(19) United States
(12) Patent Application Publication
(10) Pub. No.: US 2025/0188154 A1
(43) Pub. Date: Jun. 12, 2025

(54) CORONAVIRUS ANTIBODIES AND USES THEREOF

(71) Applicants: Duke University, Durham, NC (US); THE UNITED STATES OF AMERICA, AS REPRESENTED BY THE SECRETARY, DEPARTMENT OF HEALTH & HUMAN SERVICES, Bethesda, MD (US)

(72) Inventors: Gregory Sempowski, Durham, NC (US); Barton F. Haynes, Durham, NC (US); Kevin Saunders, Durham, NC (US); Dapeng Li, Durham, NC (US); Xiaozhi Lu, Durham, NC (US); Robert J. Edwards, Durham, NC (US); Priyamvada Acharya, Durham, NC (US); Kartik Manne, Durham, NC (US); Sophie Gobeil, Durham, NC (US); John R. Mascola, Bethesda, MD (US); Barney S. Graham, Bethesda, MD (US); Tongqing Zhou, Bethesda, MD (US)

(21) Appl. No.: 18/026,544

(22) PCT Filed: Sep. 15, 2021
(86) PCT No.: PCT/US2021/050552

§ 371 Date: Mar. 15, 2023

Related U.S. Application Data
(60) Provisional application No. 63/078,666, filed on Sep. 15, 2020.
(60) Provisional application No. 63/126,267, filed on Dec. 16, 2020.
(60) Provisional application No. 63/180,564, filed on Apr. 27, 2021.
(60) Provisional application No. 63/212,078, filed on Jun. 17, 2021.

(51) Int. Cl. C07K 16/10; A61K 39/00; A61P 37/04

(52) U.S. Cl. CPC C07K 16/1003; A61P 37/04; A61K 2039/505; C07K 2317/24; C07K 2317/55; C07K 2317/76; C07K 2317/92

(57) ABSTRACT

Recombinant monoclonal antibodies (mAbs) and fragments that bind specifically to coronavirus spike protein. Herein, monoclonal antibodies were recombinantly derived from isolated B cell from coronavirus infected individuals. Such antibodies bind various epitopes on the coronavirus spike protein and are neutralizing. The invention provides methods for using the inventive antibodies in prophylactic and/or therapeutic methods to prevent or treat coronavirus infection.

[0001] This application claims the benefit of and priority to U.S. Patent Application No. 63/078,666 filed on Sep. 15, 2020, U.S. Patent Application No. 63/126,267 filed on Dec. 16, 2020, U.S. Patent Application No. 63/180,564 filed on Apr. 27, 2021, and U.S. Patent Application No. 63/212,078 filed on Jun. 17, 2021 the content of each application is herein incorporated by reference in its entirety.

### GOVERNMENT SUPPORT

[0002] This invention was made with government support under HR0011-17-2-0069 awarded by Defense Advanced Research Projects Agency (DARPA), U19AI142596 awarded by National Institutes of Health: National Institute of Allergy and Infectious Diseases (NIAID), and a contract from the State of North Carolina funded by the Coronavirus Aid, Relief, and Economic Security Act (CARES Act). The government has certain rights in the invention.

### ASCII TABLES AND SEQUENCE LISTING FILES

[0003] The instant application contains a Sequence Listing which has been submitted electronically in ASCII format and is hereby incorporated by reference in its entirety. Said ASCII copy, created Sep. 14, 2021, is named 2933311-000042-WO1 SL.txt and is 962,359 bytes in size.

[0004] This patent application incorporates by reference herein the tables that have been submitted electronically in ASCII format in U.S. Patent Application No. 63/126,267 filed on Dec. 16, 2020, U.S. Patent Application No. 63/180,564 filed on Apr. 27, 2021, and U.S. Patent Application No. 63/212,078 filed on Jun. 17, 2021. Said ASCII tables, created Nov. 30, 2020, are as follows:
[0005] (1) Table S1-SARS-COV-1 Donor MBC.txt, 93,910 bytes
[0006] (2) Table S1-SARS-COV-2 Donor MBC.txt, 532,698 bytes
[0007] (3) Table S1-SARS-COV-2 Donor Plasmablast.txt, 257,140 bytes
[0008] (4) Table S8-COVID-19 NTD NAbs (n=10).txt, 5,652 bytes
[0009] (5) Table S8-COVID-19 NTD non-Abs (n=31).txt, 15,760 bytes
[0010] (6) Table S8-COVID-19 RBD NAbs (n=44).txt, 22,497 bytes
[0011] (7) Table S8-COVID-19 RBD non-NAbs (n=37).txt, 18,002 bytes
[0012] (8) Table S8-COVID-19 S2 Abs (n=65).txt, 33,848 bytes
[0013] (9) Table S8-Cross-reactive Abs (n=80).txt, 55,691 bytes

[0014] All patents, patent applications and publications cited herein are hereby incorporated by reference in their entirety. The disclosures of these publications in their entireties are hereby incorporated by reference into this application in order to more fully describe the state of the art as known to those skilled therein as of the date of the invention described and claimed herein

[0015] This patent disclosure contains material that is subject to copyright protection. The copyright owner has no objection to the facsimile reproduction by anyone of the patent document or the patent disclosure as it appears in the U.S. Patent and Trademark Office patent file or records, but otherwise reserves any and all copyright rights.

### TECHNICAL FIELD

[0016] The invention relates to human antibodies binding to and/or neutralizing Coronaviruses, including but not limited to SARS Coronavirus 2 (SARS-COV-2) virus and their uses.

### BACKGROUND

[0017] Severe Acute Respiratory Syndrome Coronavirus 2 (SARS-COV-2) is related to SARS-CoV and several SARS-like bat CoVs (F. Wu, et al., A new coronavirus associated with human respiratory disease in China. Nature 579, 265-269 (2020)). CoV entry into host cells is mediated by the viral S glycoprotein, which forms trimeric spikes on the viral surface (F. Li, Structure, function, and evolution of coronavirus spike proteins. Annu. Rev. Virol. 3, 237-261 (2016)). Each monomer in the trimeric S assembly is a heterodimer of S1 and S2 subunits. The S1 subunit is composed of four domains: an N-terminal domain (NTD), a C-terminal domain (CTD), and subdomains I and II (A. C. Walls, et al., Cryo-electron microscopy structure of a coronavirus spike glycoprotein trimer. Nature 531, 114-117 (2016); M. A. Tortorici, D. Veesler, Structural insights into coronavirus entry. Adv. Virus Res. 105, 93-116 (2019); D. Wrapp, et al., Cryo-EM structure of the 2019-nCOV spike in the prefusion conformation. Science 367, 1260-1263 (2020)). The CTD of both SARS-COV and SARS-COV-2 functions as the receptor-binding domain (RBD) for the shared entry receptor, human angiotensin converting enzyme 2 (hACE2) (W. Song et al., Cryo-EM structure of the SARS coronavirus spike glycoprotein in complex with its host cell receptor ACE2. PLOS Pathog. 14, e1007236 (2018); J. Lan et al., Structure of the SARS-COV-2 spike receptor-binding domain bound to the ACE2 receptor. Nature 581, 215-220 (2020); M. Hoffmann et al., SARS-COV-2 cell entry depends on ACE2 and TMPRSS2 and is blocked by a clinically proven protease inhibitor. Cell 181, 271-280.e8 (2020); Q. Wang et al., Structural and functional basis of SARS-COV-2 entry by using human ACE2. Cell 181, 894-904.e9 (2020); F. Li, Receptor recognition mechanisms of coronaviruses: A decade of structural studies. J. Virol. 89, 1954-1964 (2015)). The S2 subunit contains the fusion peptide, heptad repeat 1 and 2, and a transmembrane domain, all of which are required for fusion of the viral and host cell membranes.

[0018] The S glycoprotein of HCoVs is the primary target for neutralizing antibodies (nAbs) (S. Jiang, et al., Neutralizing antibodies against SARS-COV-2 and other human coronaviruses. Trends Immunol. 41, 355-359 (2020)). SARS-COV and SARS-COV-2 share 76% amino acid identity in their S proteins, raising the possibility of conserved immunogenic surfaces on these antigens. Studies of convalescent sera and a limited number of monoclonal antibodies (mAbs) have revealed limited to no cross-neutralizing activity, demonstrating that conserved antigenic sites are rarely targeted by nAbs (D. Wrapp, et al., Cryo-EM structure of the 2019-nCOV spike in the prefusion conformation. Science 367, 1260-1263 (2020); Q. Wang et al., Structural and functional basis of SARS-COV-2 entry by using human ACE2. Cell 181, 894-904.e9 (2020); X. Ou et al., Characterization of spike glycoprotein of SARS-COV-2 on virus entry and its immune cross-reactivity with SARS-COV. Nat. Commun. 11, 1620 (2020); H. Lv et al., Cross-reactive antibody response between SARS-COV-2 and SARS-COV infections. Cell Rep. 31, 107725 (2020)). However, the frequencies, specificities, and functional activities of cross-reactive antibodies induced by natural SARS-COV and SARS-COV-2 infection remain poorly defined.

### SUMMARY OF THE INVENTION

[0019] In certain aspects the present invention provides monoclonal antibodies (mAbs) and fragments thereof that bind to alpha, beta, delta or gamma coronavirus antigens, including without limitation SARS-COV-2 antigens. In certain embodiments, these are neutralizing antibodies that bind to SARS-COV-2 spike protein. In other embodiments, these are antibody dependent cellular cytotoxicity or other anti-viral Fc-Receptor mediating antibodies. As used herein, the term “antibody” is used broadly, and can refer to proteins and/or nucleic acids of a full-length antibody, a fragment, or synthetic forms thereof.

[0020] In certain aspects the present invention provides recombinant coronavirus antibodies, or antigen binding fragments thereof, wherein in certain non-limiting embodiments the antibody or fragment thereof binds to a coronavirus. A recombinant coronavirus monoclonal antibody, or an antigen binding fragment thereof, which binds to coronavirus spike protein and comprises a variable heavy (VH) domain and a variable light (VL) domain that have amino acid sequences that have an overall 80%, 81%, 82%, 83%, 84%, 85%, 86%, 87%, 88%, 89%, 90%, 91%, 92%, 93%, 94%, 95%, 95%, 96%, 97%, 98%, 99% or 100% sequence identity to the VH and VL domains of an antibody described herein, for example listed in Tables 3-6, 10 or 11, or wherein the VH domain and VL domain each have at least 80%, 81%, 82%, 83%, 84%, 85%, 86%, 87%, 88%, 89%, 90%, 91%, 92%, 93%, 94%, 95%, 95%, 96%, 97%, 98%, 99% or 100% sequence identity to the VH and VL domains, respectively, of an antibody an antibody described herein, for example listed in Tables 3-6, 10 or 11. In certain embodiments the antibodies are neutralizing antibodies. In certain embodiments, the antibody specifically binds to RBD of the coronavirus spike protein. In certain embodiments, the RBD binding antibodies block ACE2 receptor interaction. In certain embodiments, the antibody specifically binds to NTD of the coronavirus spike protein. In certain embodiments, the NTD antibodies do not display ADE. In certain embodiments, the antibody is specific for CoV2. In certain embodiments the antibody is cross-reactive with other coronaviruses, e.g. without limitation SARS-COV-1, MERS-COV, 229E, NL63, HKUI, OC43, bat coronavirus, and/or pangolin coronavirus. In certain embodiments, the antibody, or the antigen-binding fragment thereof, wherein the concentration of the antibody, or antigen-binding fragment thereof, required for 50% neutralization of coronavirus, e.g but not limited to CoV2 virus, (IC50) is as described in Table 4A and 4B. In certain embodiments, IC50 is up to about 1 mcg/ml, up to about 500 ng/ml, up to about 250 ng/ml, up to about 100 ng/ml or up to about 50 ng/ml. In certain embodiments, the antibody or antigen binding fragment thereof, binds to the surface of coronavirus-infected cells and mediates either clearance, complement lysis or NK or CD8 killing of coronavirus-infected cells.

[0021] There are additional antibodies and sequences described in FIGS. 38, 45 and 46. All embodiments described herein that refer to Table 3, 4, 5, 6, 10 or 11 may also encompass these additional human antibody sequences.

[0022] In certain aspects, the antibody binds to CoV-2 spike protein. In certain aspects, the antibody binds to the CoV-2 spike protein and may not be cross-reactive to SARS-COV spike protein. In certain aspects, the antibody binds CoV-2 spike protein and is cross-reactive to other human or animal-derived coronavirus spike proteins, for example but not limited to SARS-COV-1 spike protein. In certain aspects, the antibody can neutralize or inhibit binding of SARS COV-2 to the human or animal ACE2 receptor. In certain aspects, the antibody has a binding affinity to SARS-COV-2 spike protein that is stronger than the binding affinity between SARS-COV-2 spike protein and the human ACE2 receptor. Herein, monoclonal antibodies were recombinantly produced from B cell receptor cells isolated from patients infected with SARS-COV2. The invention provides methods for using such antibodies for passive immunotherapy and/or diagnostic purposes.

[0023] In certain aspects, provided are antibodies and fragments comprising VH and VL (as used herein, VH and VL can also be referred to as VH or VL and VH or VL, respectively) sequences of the antibodies described in Tables 3-6, 10 or 11, the Examples and Figures disclosing amino acid and nucleic acid sequences. Figures disclose complete heavy and light nucleotide sequences, and the VH and VL domains are readily determined in these sequences. For example, VH and VL are readily derived from the nucleotide sequences or amino acid sequences by any suitable method, such as but not limited by IMGT and other online tools as cited herein, which tools not only provide amino acid translations, but also variable domains of the heavy and light chains, predicted CDR and framework boundaries. See, e.g., http://www.imgt.org/IMGT_vquest/. More specifically, for example, a nucleotide sequence for a VH or VL domain can be input at http://www.imgt.org/IMGT_vquest/input and results include “V-REGION translation” that provides the nucleotide sequence and amino acid translation along with the framework and CDR boundaries according to the IMGT scheme.

[0024] In certain aspects, the antibodies or fragments have a binding specificity as described in Tables 3-6, 10 or 11, the accompanying Examples and Figures.

[0025] In certain aspects, the antibodies are recombinant antibodies having an IgG or IgM Fc domain, or a portion thereof.

[0026] In certain aspects, provided are recombinant antibodies and fragments comprising HCDR1-3 and LCDR1-3 (as used herein, the VH CDRs can be referred to as HCDR1-3 or CDRH1-3; likewise, the VL CDRs can be referred to as LCDR1-3 or CDRL1-3) from the pairs of VH and VL sequences as described in Table 3-6, 10 or 11, and accompanying Figures. In one aspect, the antibody comprises HCDR1-3 and LCDR1-3 of antibody DH1043. In one aspect, the antibody comprises HCDR1-3 and LCDR1-3 of antibody DH1042. In one aspect, the antibody comprises HCDR1-3 and LCDR1-3 of antibody DH1041. In one aspect, the antibody comprises HCDR1-3 and LCDR1-3 of antibody DH1047. In one aspect, the antibody comprises HCDR1-3 and LCDR1-3 of antibody DH1050.1.

[0027] In certain aspects, an antibody that comprises HCDR1-3 and LCDR1-3 of an antibody of Table 3-6, 10 or 11 is affinity matured by testing mutations in one or more of the CDRs. In one aspect, an antibody that comprises HCDR1-3 and LCDR1-3 of an antibody of Tables 3-6, 10 or 11 or is affinity matured by testing mutations only in HCDR3. In certain aspects, mutations are favorable when the antibody maintains binding specificity but improves affinity or avidity for the antigen.

[0028] In certain aspects, the invention provides a pharmaceutical composition comprising the recombinant antibodies of the invention.

[0029] In certain aspects, the invention provides nucleic acids comprising sequences encoding antibodies comprising VH and VL sequences of the inventive antibodies, e.g. from Tables 3-6, 10 or 11. In certain embodiments, the nucleic acids are DNAs. In certain embodiments, the nucleic acids are mRNAs. In certain aspects, the invention provides expression vectors comprising the nucleic acids of the invention.

[0030] In certain aspects, the invention provides a pharmaceutical composition comprising mRNAs encoding the inventive antibodies. In certain embodiments, these are optionally formulated in lipid nanoparticles (LNPs). In certain embodiments, the mRNAs are modified. Modifications include without limitations modified ribonucleotides, poly-A tail, 5′cap.

[0031] In certain aspects, the invention provides a kit comprising: a composition comprising an antibody of the invention, a syringe, needle, or applicator for administration of the antibody to a subject; and instructions for use.

[0032] In certain aspects, the invention provides prophylactic methods comprising administering the pharmaceutical composition of the invention.

[0033] In certain aspects, the invention provides methods of treatment comprising administering the pharmaceutical composition of the invention. The methods are applicable to diseases or conditions, e.g. but not limited to prophylaxis, suspected or diagnosed coronavirus infection, that will benefit from passive immunization with coronavirus targeting antibodies or combinations thereof.

[0034] In certain aspects, provided are antibodies and fragments comprising VH and VL sequences as described, e.g. Tables 3-6, 10 or 11.

[0035] In certain aspects, the invention provides a pharmaceutical composition comprising the recombinant antibodies of the invention.

[0036] In certain aspects, the invention provides nucleic acids comprising sequences encoding coronavirus antibodies comprising VL and VH sequences of the invention. In certain embodiments, the nucleic acids are DNAs. In certain embodiments, the nucleic acids are mRNAs. In certain aspects, the invention provides expression vectors comprising the nucleic acids of the invention.

[0037] In certain aspects, the invention provides a pharmaceutical composition comprising mRNAs encoding the inventive antibodies. In certain embodiments, these are optionally formulated in lipid nanoparticles (LNPs). In certain embodiments, the mRNAs are modified. Modifications include without limitations modified ribonucleotides, poly-A tail, 5′cap.

[0038] In certain aspects, the invention provides prophylactic methods comprising administering the pharmaceutical composition of the invention. In certain embodiments, the methods lead to protection from infection, disease, reduced severity of disease, including but not limited to reduced severity of symptoms and/or reduced duration of coronavirus infection and disease.

[0039] In non-limiting embodiments, the coronavirus infection is caused by SARS-COV-2. In non-limiting embodiments the disease is COVID19.

[0040] In certain aspects, the invention provides methods of treatment comprising administering the pharmaceutical composition of the invention. The pharmaceutical composition comprises at least one antibody of the invention formulated as a recombinant protein, a nucleic acid encoding the antibody or a combination thereof.

[0041] In certain embodiments, the methods comprise administering additional therapeutic or prophylactic agents, including but not limited to additional coronavirus neutralizing antibodies, small molecule therapeutics, or any other suitable agent. In certain embodiments, the coronavirus antibodies have different specificities.

[0042] In certain aspects, the invention provides a kit comprising: a composition comprising an antibody of the invention, a syringe, needle, or applicator for administration of the antibody to a subject; and instructions for use.

[0043] In certain aspects the invention provides a method of treating a subject, the method comprising steps of: administering to a subject suffering from or susceptible to coronavirus infection therapeutically effective amount of an antibody of the invention. In certain embodiments the antibody is administered as a therapeutic and/or prophylactic measure. Prophylactic methods comprise pre-exposure administration. In some embodiments, the methods comprise administering an antibody of the invention as recombinant protein. In some embodiments, the methods comprise administering an antibody of the invention as a nucleic acid.

[0044] In some embodiments, the methods comprise administering a combination treatment with antibodies, wherein the combination comprises at least one inventive antibody. In some embodiments, at least one of the antibodies in a combination treatment is a neutralizing antibody. Without wishing to be bound by theory, a treatment method comprising a combination of antibodies targeting different epitopes can reduce viral neutralization escape.

[0045] In some embodiments, at least one or more of the antibodies has RBD specificity. In some embodiments, at least one or more of the antibodies is RBD/ACE2 blocking. In some embodiments, where for example two antibodies are administered, the antibodies have different epitopes.

[0046] Different epitopes can be located in the same area of the spike protein or different area of the spike protein, e.g. but not limited to the RBD, NTD, S2 etc.

[0047] Several of the antibodies do not cross-block each other in experiment of surface plasmon resonance assays. Table 8 shows the RBD antibodies that do or do not cross-block each other, Table 9 shows the NTD antibodies that do or do not block each other and Table 10 shows the RBD and NTD antibodies that do not block each other. Those antibodies that do not block each other can be used in combinations of neutralizing antibodies for either prevention of SARS-COV-2 infection or for treatment of COVID-1 disease. Other antibodies listed in Tables 3-6, 10 or 11 that are not in the Tables 8-10 herein, can also be combined for prevention or treatment by performing the same types of blocking experiments with surface plasmon resonance.

[0048] In certain embodiments, the antibody used in the methods of the invention is any one of the antibodies from Table 3-6, 10 or 11. In certain embodiments, the antibody is any one of Ab026116 (DH1043), or Ab026124 (DH1041) or Ab026103 (DH1042) (RBD/ACE2 blocking Abs), or a combination thereof. In certain embodiments, the methods comprise administering a combination of antibodies, wherein at least one of the antibodies in a combination is selected from Table 3-6, 10 or 11. In some embodiments the combination comprises RBD/ACE2 blocking antibody, e.g. Ab026116 (DH1043, RBD/ACE2 blocking), Ab026124 (DH1041) or Ab026103 (DH1042), Ab026204 (DH1046) (RBD/SARS1-CoV-1 cross-reactive), and any one of Ab026016 (DH1050.1), Ab12213 (DH1050.2) or Ab026013 (DH1051) (NTD), or a combination thereof. SPR competition experiments with DH1047, DH1046, DH1073 and DH1235 show that DH1047, DH1046, and DH1235 were outcompeted by one another (FIG. 74D), whereas DH1073 was not, indicating that DH1073 targets a distinct non-cross-competing epitope. Thus, in certain non-limiting embodiments, RBD antibodies targeting non-cross-competing epitopes can be used in a combination treatment. In non-limiting embodiments, the combination comprises DH1073 antibody or antigen binding fragment thereof, and any other non-cross-competing antibody, e.g. without limitation DH1047, DH1046, or DH1042. These non-crossreactive antibodies targeting RBD can be combined with an antibody targeting any other epitope, e.g., without limitation NTD targeting antibodies.

[0049] In certain embodiments, the antibody or antigen binding fragment preferentially or specifically binds to coronavirus spike protein. In certain embodiments, the VH domain and VL domain each have at least 90% sequence identity to the VH and VL domains, respectively, of an antibody listed in Tables 3-6, 10 or 11.

[0050] In certain embodiments, (a) VL domain CDRL1-3 regions together have no more than 10 amino acid variations as compared to the corresponding CDRL1-3 regions of an antibody listed in Tables 3-6, 10 or 11, and (b) VH domain CDRH1-3 regions together have no more than 10 amino acid variations as compared to the corresponding CDRH1-3 regions of an antibody listed in Tables 3-6, 10 or 11.

[0051] In certain embodiments, wherein the antibody or fragment is human or fully-human.

[0052] In certain embodiments, wherein the VH domain and VL domain of the antibody or fragment comprises framework regions that each have no more than 20, or 10 or 5 amino acid variations as compared to the corresponding framework regions of a human antibody listed in Tables 3-6, 10 or 11.

[0053] In certain embodiments, (a) VL domain CDRL1-3 regions together have no more than 10 amino acid variations as compared to the corresponding CDRL1-3 regions of an antibody listed in Tables 3-6, 10 or 11, (b) VH domain CDRH1-3 regions together have no more than 10 amino acid variations as compared to the corresponding CDRH1-3 regions of the antibody listed in Tables 3-6, 10 or 11, and (c) the VL domain and VH domain framework regions each have no more than 10 or 5 amino acid variations as compared to the corresponding framework regions of the human antibody listed in Tables 3-6, 10 or 11.

[0054] In certain embodiments, the antibody, or the antigen-binding fragment thereof comprises an Fc moiety. In certain embodiments, wherein the antibody, or antigen-binding fragment thereof, comprises a mutation(s) in the Fc moiety that reduces binding of the antibody to an Fc receptor and/or increases the half-life of the antibody.

[0055] In certain embodiments, the antibody, or the antigen binding fragment thereof, is a purified antibody, a single chain antibody, Fab, Fab′, F(ab′)2, Fv or scFv.

[0056] In certain embodiments, the antibody is of any isotype.

[0057] In certain aspect the invention provide antibody, or the antigen-binding fragment thereof, for use as a medicament.

[0058] In certain aspect the invention provide a nucleic acid molecule comprising a polynucleotide encoding an antibody of the invention or the antigen-binding fragment thereof.

[0059] In certain embodiments, the polynucleotide sequence comprises, consists essentially of or consists of a nucleic acid sequence according to any one of the sequences in FIG. 20-25, 46; or a functional sequence variant thereof having at least 70%, at least 75%, at least 80%, at least 85%, at least 88%, at least 90%, at least 92%, at least 95%, at least 96%, at least 97%, at least 98% or at least 99% sequence identity. In certain embodiments, the functional variation is 80%, 81%, 82%, 83%, 84%, 85%, 86%, 87%, 88%, 89%, 90%, 91%, 92%, 93%, 94%, 95%, 96%, 97%, 98% or 99% identity.

[0060] In certain aspects the invention provides a vector comprising a nucleic acid molecule encoding an antibody of the invention or antigen binding fragment thereof.

[0061] In certain aspects the invention provides a cell expressing an antibody of the invention, or the antigen binding fragment thereof.

[0062] In certain aspects the invention provides pharmaceutical composition comprising an antibody of the invention, a combination of antibodies comprising at least one antibody of the invention or the antigen binding fragment thereof, a nucleic acid encoding an antibody of the invention or a fragment thereof and/or a cell expressing an antibody of the invention, or the antigen binding fragment thereof, and optionally a pharmaceutically acceptable carrier. In certain embodiments, the composition is suitable for pharmaceutical use.

[0063] In certain aspect, the composition further comprises a pharmaceutically acceptable excipient, diluent or carrier.

[0064] In certain aspects, the invention provides an in vitro transcription system to synthesize ribonucleic acids (RNAs) encoding antibodies of the invention, comprising: a reaction vessel, a DNA vector template comprising nucleic acid sequence encoding an antibody of the invention as described in Tables 3-6, 10 or 11, and reagents for carrying out an in vitro transcription reaction that produces mRNA encoding an antibody or fragment thereof of the invention. In certain embodiments the mRNA is modified mRNA.

[0065] In certain aspects, the invention provides a method for manufacturing an mRNA encoding an antibody or antigen binding fragment thereof, comprising:
[0066] a. providing an in vitro transcription reaction vessel comprising a DNA template encoding an antibody or fragment thereof according to any of the preceding claims and reagents under conditions suitable for in vitro transcription of the nucleic acid template, thereby producing an mRNA template encoding an antibody or fragment thereof, and
[0067] b. isolating the mRNA by any suitable method of purification and separating reaction reagents, the DNA template, and/or mRNA product related impurities. In certain embodiments, the mRNA comprises modified nucleotides. In certain embodiments, the mRNA comprises 5′-CAP, and/or any other suitable modification.

[0068] In certain aspects, the invention provides a method for manufacturing an antibody or antigen binding fragment thereof, comprising culturing a host cell comprising a nucleic acid encoding an antibody of the invention under conditions suitable for expression of the antibody or fragment thereof and isolating said antibody or antigen binding fragment thereof.

[0069] In certain embodiments, the antibodies can be combined in one trispecific antibody with each arm of the antibody expressing a fragment of one of the antibodies in Tables 3-6, 10-11. See Ling Xu, et al. Science 6 Oct. 2017: Vol. 358, Issue 6359, pp. 85-90 DOI: 10.1126/science.aan8630.

[0070] In certain embodiments, the antibodies can be combined in various forms of bi-specific antibodies such as DARTS or other bispecific designs. See e.g. J Clin Invest 2015 Nov. 2;125 (11): 4077-90, doi: 10.1172/JCI82314. Epub 2015 Sep. 28, Bispecific Antibodies Targeting Different Epitopes on the HIV-1 Envelope Exhibit Broad and Potent Neutralization. Asokan M, Rudicell R S, Louder M, McKee K, O'Dell S, Stewart-Jones G, Wang K, Xu L, Chen X, Choe M, Chuang G, Georgiev I S, Joyce M G, Kirys T, Ko S, Pegu A, Shi W, Todd J P, Yang Z, Bailer R T, Rao S, Kwong P D, Nabel G J, Mascola J R. J Virol. 2015 December;89 (24): 12501-12, doi: 10.1128/JVI.02097-15. Epub 2015 Oct. 7.PMID: 26446600.

[0071] In certain aspect the invention provides a recombinant coronavirus monoclonal antibody, or an antigen binding fragment thereof, which binds to coronavirus spike protein and comprises a variable heavy (VH) domain and a variable light (VL) domain that have amino acid sequences that have an overall 80% sequence identity to the VH and VL domains of an antibody listed in Tables 3-6, 10 or 11, or wherein the VH domain and VL domain each have at least 80% sequence identity to the VH and VL domains, respectively, of an antibody listed in Tables 3-6, 10 or 11. In certain embodiments the antibodies are neutralizing antibodies. In certain embodiments, the antibody specifically binds to RBD of the coronavirus spike protein. In certain embodiments, the RBD binding antibodies block ACE2 receptor interaction. In certain embodiments, the antibody specifically binds to NTD of the coronavirus spike protein. In certain embodiments, the NTD antibodies do not display ADE. In certain embodiments the NTD antibodies mediate ADCC or other FcR-mediated anti-viral activity. In certain embodiments, the antibody specifically binds to the S2 of the coronavirus spike protein. In certain embodiments, the S2 antibodies mediate neutralization of certain coronaviruses. In certain embodiments the S2 antibodies mediate ADCC or other FcR-mediated anti-viral activity. In certain embodiments, the antibody is specific for CoV2. In certain embodiments the antibody is crossreactive with other coronaviruses, e.g. SARS-COV-1, MERS-COV, 229E, NL63, HKU1, OC43, bat coronavirus, and/or pangolin coronavirus. In certain embodiments, the antibody, or the antigen-binding fragment thereof, wherein the concentration of the antibody, or antigen-binding fragment thereof, required for 50% neutralization of coronavirus, e.g but not limited to CoV2 virus, (IC50) is as described in Table 4. In certain embodiments, IC50 is up to about 1 microg/ml, up to about 500 ng/ml, up to about 250 ng/ml, up to about 100 ng/ml or up to about 50 ng/ml.

[0072] In non-limiting embodiments, the antibody, or antigen binding fragment thereof binds to coronavirus domain RBD, NTD, or S2. In certain embodiments the binding specificity is as described in Table 4.

[0073] The antibody, or the antigen-binding fragment thereof, according to any of claims 1-4, wherein the antibody, or antigen-binding fragment thereof, is a recombinant human monoclonal antibody.

[0074] In certain aspects the invention provides recombinant coronavirus antibody or the antigen binding fragment thereof, as described in Table 4, e.g. without limitation DH1046, DH1047, DH1073, DH1235.

[0075] In certain embodiments the antibody or antigen binding fragment thereof, comprises a heavy chain (VH) comprising at least one CDRH1, at least one CDRH2 and at least one CDRH3 and a light chain (VL) comprising at least one CDRL1, at least one CDRL2 and at least one CDRL3, wherein at least one CDR, comprises, consists essentially of or consists of an amino acid sequence according to any of the sequences listed in FIGS. 20-25, 46, 38, 45, or a functional sequence variant thereof having at least 70%, at least 75%, at least 80%, at least 85%, at least 88%, at least 90%, at least 92%, at least 95%, at least 96%, at least 97%, at least 98% or at least 99% sequence identity. In certain embodiments, the functional sequence variant has 80%, 81%, 82%, 83%, 84%, 85%, 86%, 87%, 88%, 89%, 90%, 91%, 92%, 93%, 94%, 95%, 96%, 97%, 98% or 99% identity.

[0076] In certain embodiments the antibody or antigen binding fragment thereof, comprises a heavy chain (VH) comprising CDRH1, CDRH2 and CDRH3 and a light chain (VL) comprising CDRL1, CDRL2 and CDRL3, wherein the CDR, comprises, consists essentially of or consists of an amino acid sequence according to any of the sequences listed in FIGS. 20-25, 46, 38, 45, or a functional sequence variant thereof having at least 70%, at least 75%, at least 80%, at least 85%, at least 88%, at least 90%, at least 92%, at least 95%, at least 96%, at least 97%, at least 98% or at least 99% sequence identity. In certain embodiments, the functional sequence variant has 80%, 81%, 82%, 83%, 84%, 85%, 86%, 87%, 88%, 89%, 90%, 91%, 92%, 93%, 94%, 95%, 96%, 97%, 98% or 99% identity.

[0077] In certain embodiments, (a) VI domain CDRL1-3 regions together have no more than 5, 6, 7, 8, 9, or 10 amino acid variations as compared to the corresponding CDRL1-3 regions of an antibody listed in Table 4, (b) Vh domain CDRH1-3 regions together have no more than 5, 6, 7, 8, 9, or 10 amino acid variations as compared to the corresponding CDRH1-3 regions of the antibody listed in Table 4, and (c) the VI domain and Vh domain framework regions are derived from a human antibody.

[0078] In certain embodiments, (a) VI domain CDRL1-3 regions together have 1, 2, 3, 4 5, 6, 7, 8, 9, or 10 amino acid variations as compared to the corresponding CDRL1-3 regions of an antibody listed in Table 4, (b) Vh domain CDRH1-3 regions together have 1, 2, 3, 4 5, 6, 7, 8, 9, or 10 amino acid variations as compared to the corresponding CDRH1-3 regions of the antibody listed in Table 4, and (c) the VI domain and Vh domain framework regions are derived from a human antibody.

[0079] In certain embodiments, (a) VI domain framework regions together have 1, 2, 3, 4 5, 6, 7, 8, 9, or 10 amino acid variations as compared to the corresponding CDRL1-3 regions of an antibody listed in Table 4, (b) Vh domain framework regions together have 1, 2, 3, 4 5, 6, 7, 8, 9, or 10 amino acid variations as compared to the corresponding CDRH1-3 regions of the antibody listed in Table 4, and (c) the VI domain and Vh domain framework regions are derived from a human antibody.

[0080] In certain embodiments, the antibody or antigen binding fragment thereof, comprises a heavy chain comprising at least one CDRH1, at least one CDRH2 and at least one CDRH3 and a light chain comprising at least one CDRL1, at least one CDRL2 and at least one CDRL3, wherein at least one CDR, comprises, consists essentially of or consists of an amino acid sequence according to any of paired VHH712384 and VI K711897 (DH1047) sequences in Table 6 and FIG. 20, VhDH1073 VH and VI DH1073 VK in FIG. 46C, Vh DH1235 VH and VI DH1235 VK in FIG. 46C, Vh H026103 and VI K023879 (DH1042) sequences in Table 6 and FIG. 20, VH H026124 and VL L024055 (DH1041) sequences in Table 6 and FIG. 20, VH H026116 and VL K023888 (DH1043) in FIG. 20 or a functional sequence variant thereof having at least 70%, at least 75%, at least 80%, at least 85%, at least 88%, at least 90%, at least 92%, at least 95%, at least 96%, at least 97%, at least 98% or at least 99% sequence identity. In certain embodiments, the functional sequence variant has 80%, 81%, 82%, 83%, 84%, 85%, 86%, 87%, 88%, 89%, 90%, 91%, 92%, 93%, 94%, 95%, 96%, 97%, 98% or 99% identity.

[0081] In certain embodiments, the antibody or antigen binding fragment thereof, the antibody or antigen binding fragment thereof, comprises, consists essentially of or consists of paired VHH712384 and VI K711897 (DH1047) sequences in Table 6 and FIG. 20, VhDH1073 VH and VI DH1073 VK in FIG. 46C, Vh DH1235 VH and VI DH1235 VK in FIG. 46C, Vh H026103 and VI K023879 (DH1042) sequences in Table 6 and FIG. 20, VH H026124 and VL L024055 (DH1041) sequences in Table 6 and FIG. 20, VH H026116 and VL K023888 (DH1043) in FIG. 20 or a functional sequence variant thereof having at least 70%, at least 75%, at least 80%, at least 85%, at least 88%, at least 90%, at least 92%, at least 95%, at least 96%, at least 97%, at least 98% or at least 99% sequence identity. In certain embodiments the functional sequence variant has 80%, 81%, 82%, 83%, 84%, 85%, 86%, 87%, 88%, 89%, 90%, 91%, 92%, 93%, 94%, 95%, 96%, 97%, 98% or 99% identity.

[0082] In certain embodiments, the antibody or antigen binding fragment thereof comprises, consists essentially of or consists of paired VHH712384 and VI K711897 (DH1047) sequences in Table 6 and FIG. 20, VhDH1073 VH and VI DH1073 VK in FIG. 46C, Vh DH1235 VH and VI DH1235 VK in FIG. 46C, Vh H026103 and VI K023879 (DH1042) sequences in Table 6 and FIG. 20, VH H026124 and VL L024055 (DH1041) sequences in Table 6 and FIG. 20, VH H026116 and VL K023888 (DH1043) in FIG. 20.

[0083] In certain embodiments, the antibody or antigen binding fragment thereof is any one of the antibodies from Table 4. In certain embodiments, the antibody is DH1043, DH1042, DH1041, DH1050 or DH1050.1, DH1051, or DH1046. In certain embodiments, the antibody is DH1041 or DH1043 or DH1057. In certain embodiments, the antibody is DH1047, DH1073 or DH1235.

[0084] The antibody, or the antigen binding fragment thereof, according to any of the previous paragraphs, wherein the antibody, or the antigen binding fragment thereof, is a purified antibody, a single chain antibody, Fab, Fab′, F(ab′)2, Fv or scFv.

[0085] In certain aspects, the invention provides an in vitro transcription system to synthesize ribonucleic acids (RNAs) encoding antibodies of the invention, comprising: a reaction vessel, a DNA vector template comprising nucleic acid sequence encoding an antibody of the invention as described in any of the preceding claims, and reagents for carrying out an in vitro transcription reaction that produces mRNA encoding an antibody or fragment thereof of the invention. In certain embodiments the mRNA is modified mRNA.

[0086] In certain aspects, the invention provides a method for manufacturing an mRNA encoding an antibody or antigen binding fragment thereof, comprising:
[0087] a. providing an in vitro transcription reaction vessel comprising a DNA template encoding an antibody or fragment thereof according to any of the preceding claims and reagents under conditions suitable for in vitro transcription of the nucleic acid template, thereby producing an mRNA template encoding the antibody or fragment thereof according to any of the preceding claims, and
[0088] b. isolating the mRNA by any suitable method of purification and separating reaction reagents, the DNA template, and/or mRNA product related impurities. In certain embodiments, the mRNA comprises modified nucleotides. In certain embodiments, the mRNA comprises 5′-CAP, and/or any other suitable modification.

[0089] In certain aspects, the invention provides a method for manufacturing an antibody or antigen binding fragment thereof, comprising culturing a host cell comprising a nucleic acid according to any of the preceding claims under conditions suitable for expression of the antibody or fragment thereof and isolating said antibody or antigen binding fragment thereof.

[0090] In certain aspects, the invention provides a method of treating or protecting against coronavirus infection comprising administering a composition comprising an antibody or fragment thereof comprising a Vh or VI sequence of any of the antibodies of the invention, including without limitation Vh and VI sequences comprised in a bi- or tri-specific antibody format, or multivalent antibody forms.

[0091] In certain aspects the invention provides multivalent antibodies comprising any of antibodies or antigen binding fragments described herein. In certain aspects the invention provides multispecific antibodies or antigen binding fragments thereof comprising any of the antibodies described herein. In non-limiting embodiments, the multispecific antibody comprises fragments from DH1047. In non-limiting embodiments, the multispecific antibody comprises fragments from DH1047 and DH1073. In non-limiting embodiments, the multispecific antibody comprises fragments from DH1073.

[0092] In certain aspects the invention provides therapeutic and/or prophylactic methods comprising administering a therapeutic and/or prophylactic amount in a subject in need thereof anyone of the antibodies or antigen binding fragments of the invention, including without limitation a purified antibody IgG antibody, a multivalent antibody, multispecific antibody, a single chain antibody, Fab, Fab′, F(ab′)2, Fv or scFv, or any combination thereof.

[0093] A recombinant coronavirus monoclonal antibody, or an antigen binding fragment thereof, which binds to coronavirus spike protein and comprises a variable heavy (VH) domain and a variable light (VL) domain that have amino acid sequences that have an overall 80% sequence identity to the VH and VL domains of an antibody listed in Tables 3-6, 10 or 11, or wherein the VH domain and VL domain each have at least 80% sequence identity to the VH and VL domains, respectively, of an antibody listed in Tables 3-6, 10 or 11.

[0094] In certain aspects, the invention provides a recombinant coronavirus monoclonal antibody, or an antigen binding fragment thereof, which binds coronavirus spike protein, which comprises:
[0095] a. Vh domain CDRH1-3 regions from an antibody listed in Table 4; and/or
[0096] b. VI domain CDRL1-3 regions from an antibody listed in Table 4, wherein the Vh and VI are from the same antibody; and
[0097] c. Wherein the framework of the variable heavy (Vh) domain comprises amino acid sequences that have at least 90% sequence identity to the V gene, D gene and J gene of the Vh gene of the corresponding antibody from which the CDRs are derived and wherein the framework of the variable light (VI) domain comprises amino acid sequences that have at least 90% sequence identity to the V and J genes of the VI gene from the corresponding antibody from which the CDRs are derived. In non-limiting embodiments, the antibody is DH1047, DH1042, DH1046, or DH1073.

[0098] In certain aspects, the invention provides a recombinant coronavirus monoclonal antibody, or an antigen binding fragment thereof, which binds coronavirus spike protein, which comprises:
[0099] a. Vh domain CDRH1-3 regions from an antibody listed in Table 4; and/or
[0100] b. VI domain CDRL1-3 regions from an antibody listed in Table 4, wherein the Vh and VI are from the same antibody; and
[0101] c. Wherein the framework of the variable heavy (Vh) domain comprises amino acid sequences that have at least 80%, 85%, 90%, 91%, 92%, 93%, 94%, 95%, 96%, 97%, 98%, or 99% sequence identity to the V gene, D gene and J gene making up the Vh gene of the corresponding antibody from which the CDRs are derived and wherein the framework portions of the variable light (VI) domain comprises amino acid sequences that have at least 80%, 85%, 90%, 91%, 92%, 93%, 94%, 95%, 96%, 97%, 98%, or 99% sequence identity to the V and J genes making up the VI gene from the corresponding antibody from which the CDRs are derived. In non-limiting embodiments, the antibody is DH1047, DH1042, DH1046, or DH1073.

[0102] In certain aspects, the invention provides a recombinant coronavirus monoclonal antibody, or an antigen binding fragment thereof, which binds coronavirus spike protein, which comprises:
[0103] a. Vh domain CDRH1-3 regions from an antibody listed in Table 4; and/or
[0104] b. VI domain CDRL1-3 regions from an antibody listed in Table 4, wherein the Vh and VI are from the same antibody; and
[0105] c. Wherein the framework of the variable heavy (Vh) domain comprises amino acid sequences that have 80%, 85%, 90%, 91%, 92%, 93%, 94%, 95%, 96%, 97%, 98%, or 99% sequence identity to the V gene, D gene and J gene making up the Vh gene of the corresponding antibody from which the CDRs are derived and wherein the framework portions of the variable light (VI) domain comprises amino acid sequences that have 80%, 85%, 90%, 91%, 92%, 93%, 94%, 95%, 96%, 97%, 98%, or 99% sequence identity to the V and J genes making up the VI gene from the corresponding antibody from which the CDRs are derived. In non-limiting embodiments, the antibody is DH1047, DH1042, DH1046, or DH1073.

[0106] In certain embodiments, the antibody is DH1047 and the framework of the variable heavy (Vh) domain comprises, consists essentially of, consists of or has amino acid sequences derived from human IGHV1-46 and IGHJ4 Ig genes (See e.g. Table 3, Table 4D, FIG. 45) and wherein the framework of the variable light (VI) domain comprises amino acid sequences derived from IGKV4-1 and IGKJI human IgG genes (See e.g. Table 3, Table 4D, FIG. 45).

[0107] In certain embodiments, the antibody is DH1073 and the framework of the variable heavy (Vh) domain comprises, consists essentially of, consists of or has amino acid sequences derived from human IGHV1-46 and IGHJ6 Ig genes (See e.g. Table 4D, FIG. 45) and wherein the framework of the variable light (VI) domain comprises, consists essentially of, consists of or has amino acid sequences derived from IGKV3-11 and IGKJ1 human IgG genes (Table 4D, FIG. 45)

[0108] In certain embodiments, the antibody is DH1042 and the framework of the variable heavy (Vh) domain comprises, consists essentially of, consists of or has amino acid sequences derived from IGH1-69 and IGHJ6 human Ig genes (See e.g. Table 4D, FIG. 45) and wherein the framework of the variable light (VI) domain comprises, consists essentially of, consists of or has amino acid sequences derived from IGKV1-39 and IGKJ2 human IgG genes (See e.g. Table 4D, FIG. 45).

[0109] In certain embodiments, the recombinant antibody or the antigen binding fragment thereof is DH1046, DH1041, DH14043, or DH1235, and wherein the framework of the variable heavy (Vh) domain comprises, consists essentially of, consists of or has amino acid sequences derived from the corresponding human Ig genes described in FIG. 38, 45 or Table 3, Table 4 and wherein the framework of the variable light (VI) domain comprises, consists essentially of, consists of or has amino acid sequences derived from the corresponding human Ig genes described in at least in FIG. 38, 45 or Table 3, Table 4.

[0110] In certain embodiments, the antibody or antigen binding fragment thereof, comprises a heavy chain comprising at least one CDRH1, at least one CDRH2 and at least one CDRH3 and a light chain comprising at least one CDRL1, at least one CDRL2 and at least one CDRL3, wherein at least one CDR, comprises, consists essentially of or consists of an amino acid sequence according to any of paired VHH712384 and VI K711897 (DH1047) sequences in Table 6 and FIG. 20, VhDH1073 VH and VI DH1073 VK in FIG. 46C, Vh DH1235 VH and VI DH1235 VK in FIG. 46C, Vh H026103 and VI K023879 (DH1042) sequences in Table 6 and FIG. 20, VH H026124 and VL L024055 (DH1041) sequences in Table 6 and FIG. 20, VH H026116 and VL K023888 (DH1043) in FIG. 20, or a functional sequence variant thereof having at least 70%, at least 75%, at least 80%, at least 85%, at least 88%, at least 90%, at least 92%, at least 95%, at least 96%, at least 97%, at least 98% or at least 99% sequence identity. In certain embodiments, the functional sequence variant has 80%, 81%, 82%, 83%, 84%, 85%, 86%, 87%, 88%, 89%, 90%, 91%, 92%, 93%, 94%, 95%, 96%, 97%, 98% or 99% identity.

[0111] In certain embodiments, the antibody or antigen binding fragment thereof, comprises, consists essentially of or consists of paired VHH712384 and VI K711897 (DH1047) sequences in Table 6 and FIG. 20, VhDH1073 VH and VI DH1073 VK in FIG. 46C, Vh DH1235 VH and VI DH1235 VK in FIG. 46C, Vh H026103 and VI K023879 (DH1042) sequences in Table 6 and FIG. 20, VH H026124 and VL L024055 (DH1041) sequences in Table 6 and FIG. 20, VH H026116 and VL K023888 (DH1043) in FIG. 20 or a functional sequence variant thereof having at least 70%, at least 75%, at least 80%, at least 85%, at least 88%, at least 90%, at least 92%, at least 95%, at least 96%, at least 97%, at least 98% or at least 99% sequence identity. In certain embodiments the functional sequence variant has 80%, 81%, 82%, 83%, 84%, 85%, 86%, 87%, 88%, 89%, 90%, 91%, 92%, 93%, 94%, 95%, 96%, 97%, 98% or 99% identity.

[0112] In certain embodiments, the antibody, or antigen binding fragment thereof binds to coronavirus domain RBD, NTD, or S2.

[0113] In certain embodiments, the antibody, or antigen binding fragment thereof binds RBD.

[0114] In certain embodiments, wherein the antibody, or antigen-binding fragment thereof, comprises an Fc moiety. In certain embodiments, wherein the antibody, or antigen-binding fragment thereof, comprises a mutation(s) in the Fc moiety, in certain embodiments the mutation reducing binding of the antibody to an Fc receptor, in certain embodiments the mutation increasing the half-life of the recombinant antibody. In certain embodiments, the Fc mutation is “LS” mutation. In certain embodiments, the Fc mutation is “4A” mutation.

[0115] In certain embodiments, the antibody, or the antigen binding fragment thereof, is a purified antibody IgG antibody, a multivalent antibody, multispecific antibody, a single chain antibody, Fab, Fab′, F(ab′)2, Fv or scFv. In certain embodiments, the antibody is of any isotype.

[0116] In certain aspects, the invention provides an antibody, or the antigen-binding fragment thereof for use as a medicament. In certain embodiments, the use is in the prevention and/or treatment of coronavirus infection. In certain embodiments the coronavirus is CoV2.

[0117] In certain aspects, the invention provides a nucleic acid molecule comprising a polynucleotide encoding the antibody, or the antigen-binding fragment thereof, according to any of the preceding paragraphs.

[0118] In certain embodiments, the polynucleotide sequence comprises, consists essentially of or consists of a nucleic acid sequence according to any one of the sequences in FIGS. 20-26, 46, 38 and 45; or a functional sequence variant thereof having at least 70%, at least 75%, at least 80%, at least 85%, at least 88%, at least 90%, at least 92%, at least 95%, at least 96%, at least 97%, at least 98% or at least 99% sequence identity. In certain embodiments, the functional variation is 80%, 81%, 82%, 83%, 84%, 85%, 86%, 87%, 88%, 89%, 90%, 91%, 92%, 93%, 94%, 95%, 96%, 97%, 98% or 99% identity.

[0119] In certain embodiments the nucleic acid is a ribonucleic acids (RNA). In certain embodiments the RNA is mRNA which suitable for use and delivery as a therapeutic mRNA. In certain embodiment, the mRNA comprises a 5′-terminal CAP modification. In certain embodiments the mRNA comprises modified nucleotides. In certain embodiments, the mRNA is formulated in a lipid nanoparticle.

[0120] In certain aspects, the invention provides a vector comprising the nucleic acid molecule according to any of the preceding paragraphs.

[0121] In certain aspects, the invention provides a cell expressing the antibody, or the antigen binding fragment thereof, according to any of the preceding claims; or comprising a vector of the invention.

[0122] In certain aspects, the invention provides a pharmaceutical composition comprising the antibody, or the antigen binding fragment thereof, a nucleic acid encoding the same, a vector comprising the nucleic acid and/or a cell comprising the nucleic acid or vector, and optionally a pharmaceutically acceptable carrier. In certain embodiments the antibody is DH1043, DH1042, DH1041, DH1046, DH1047, DH1073, DH1235 or a combination thereof.

[0123] In certain aspects, the invention provides a pharmaceutical composition comprising the antibody, or the antigen binding fragment thereof, wherein the antibody, or the antigen binding fragment thereof, comprise a Vh and VI sequence of any of the preceding claims, wherein the Vh and VI sequences form a multivalent or multispecific antibody.

[0124] In certain aspects, the invention provides a pharmaceutical composition comprising at least one RBD binding antibody of the invention and at least one NTD binding antibody of the invention. In non-limiting embodiments, the RBD antibody is any one of the antibodies in Table 4, a fragment of variant thereof. In non-limiting embodiments, the NTD antibody is any of the antibodies in Table 4, a fragment or variant thereof.

[0125] In certain aspects, the invention provides a pharmaceutical composition comprising two RBD binding antibodies or antigen binding fragments thereof, wherein the two antibodies or antigen binding fragments thereof have non-overlapping epitopes. In certain embodiments one of the antibodies is DH1073. In certain embodiments the second RBD antibody is DH1046, DH1047, DH1042 or any other RBD binding antibody.

[0126] In certain embodiments the compositions further comprises a pharmaceutically acceptable excipient, diluent, adjuvant or carrier.

[0127] In certain aspects, the invention provides a method of treating or preventing coronavirus infection in a subject in need thereof, comprising administering the antibody, or the antigen binding fragment thereof, a nucleic acid encoding the same, a vector comprising the nucleic acid and/or a cell comprising the nucleic acid or vector, or a pharmaceutical composition of the invention in an amount suitable to effect treatment or prevention of coronavirus infection.

[0128] In certain embodiments, the antibody is administered prior to coronavirus exposure or at the same time as coronavirus exposure.

[0129] In certain aspects, the invention provides a method of treating or protecting against coronavirus infection comprising administering therapeutic or prophylactic amount of a composition comprising an antibody or antigen binding fragment thereof comprising a Vh and VI sequence of any of the preceding paragraphs, wherein the Vh and VI sequences are comprised in a bi- or tri-specific antibody format and/or in a multivalent format. In certain aspects the invention provides, nucleic acid sequences encoding these bi- or tri-specific antibody formats and/or in a multivalent formats, including modified mRNAs suitable for pharmaceutical use and delivery.

[0130] Use of the multispecific or multivalent antibodies or fragments thereof, administer as recombinant proteins, nucleic acids, including without limitation mRNAs, or a combination thereof in prophylactic or therapeutic methods. The nucleic acids and recombinant proteins can be formulated in any suitable formulation, and optionally comprise an adjuvant. In some embodiments, the adjuvant is LNP. In some embodiments, the formulation comprises LNPs.

### BRIEF DESCRIPTION OF DRAWINGS

[0131] The patent or application file contains at least one drawing executed in color. Copies of this patent or patent application publication with color drawing(s) will be provided by the Office upon request and payment of the necessary fee.

[0132] FIGS. 1A-1K show representative data of FcR-dependent and FcR-independent SARS-CoV-2 infection-enhancement mediated by RBD and NTD antibodies. (FIGS. 1A-B) Timeline of blood sampling and antibody isolation from convalescent SARS-COV-2 and SARS-COV-1 donors. Plasmablasts and/or antigen-specific memory B cells (MBC) were sorted from a (FIG. 1A) SARS-CoV-2 infected individual (SARS-COV-2 donor) and a (FIG. 1B) 2003 SARS survivor (SARS-CoV-1 donor). (FIG. 1C) Summary of number and specificity of antibodies isolated from each donor. (FIGS. 1D-E) FcR-independent SARS-COV-2 infection-enhancement mediated by non-neutralizing NTD antibodies. In vitro neutralization curves for NTD infection-enhancing antibodies against (FIG. 1D) pseudotyped SARS-COV-2 D614G in 293T-hACE2 cells, and (FIG. 1E) replication-competent nano-luciferase (nLuc) SARS-COV-2 in Vero cells. (FIGS. 1F-K) FcR-dependent SARS-COV-2 infection-enhancement in ACE2-negative cells mediated by neutralizing RBD antibodies. Pseudotyped SARS-COV-2 incubated with RBD antibodies or mock medium control were inoculated on (FIG. 1F) parental TZM-bl cells, and TZM-bl cells stably expressing human FcγR receptors (FIG. 1G) FcγRI, (FIG. 1H) FcγRIIa, (FIG. 11) FcγRIIb or (FIG. 1J) FcγRIII. The effect of RBD antibody fragment antigen-binding regions (Fabs) on pseudotyped SARS-COV-2 D614G infection were tested in (FIG. 1K) FcγRI-expressing TZM-bl cells and (FIG. 1L) FcγRIIb-expressing TZM-bl cells. Relative luminescence units (RLUs) were measured in cell lysate at 68-72 hours post-infection. Upward deflection of RLUs in the presence of antibody indicates FcR-mediated infection. Three or four independent experiments were performed and representative data are shown.

[0133] FIGS. 2A-2E show representative structural and phenotypic characterization of infection-enhancing and non-infection-enhancing RBD and NTD antibodies. (FIG. 2A) Summary of down-selected antibodies. Binding domain, effect (neutralizing or infection-enhancing) in ACE2-positive/FcγR-negative cells and ACE2-negative/positive cells, cross-reactivity with SARS-COV-1, ACE2 blocking activity, neutralization titers against pseudovirus and replication-competent viruses were shown. MN titer, micro-neutralization titer. (FIGS. 2B-E) 3D reconstruction of negative stain electron microscopy of SARS-COV-2 Spike trimer stabilized with 2 proline mutations (S-2P) binding to (FIG. 2B) infection-enhancing RBD antibody fabs, (FIG. 2C) non-infection-enhancing RBD antibody Fabs, (FIG. 2D) infection-enhancing NTD antibody Fabs, (FIG. 2E) non-infection-enhancing NTD antibody Fabs.

[0134] FIGS. 3A-3H show representative biophysical and structural determination that infection-enhancing and non-infection enhancing antibodies can simultaneously bind to the same S protein. (FIG. 3A) Cross-blocking activity of RBD and NTD neutralizing antibodies tested by surface plasmon resonance (SPR). SARS-COV-2 S-2P trimer was captured by the antibody on the Y-axis followed by binding by the antibody on the X-axis. We defined competition if the binding antibody did not bind the captured S protein. (FIG. 3B) 3D reconstruction of simultaneous recognition of SARS-COV-2 S-2P trimer by two RBD antibodies DH1041+DH1047, or DH1043+DH1047. All three antibodies are infection-enhancing in ACE2-negative/FcγR-positive cells but neutralizing SARS-COV-2 in ACE2-positive/FcγR-negative cells. (FIG. 3C) Cross-blocking activity of neutralizing antibodies and infection-enhancing NTD antibodies tested by SPR. SARS-COV-2 S-SP trimer was captured by the antibody on the Y-axis followed by binding by the antibody on the X-axis. We defined competition if the binding antibody did not bind the captured S protein. (FIG. 3D) 3D reconstruction of simultaneous recognition of SARS-COV-2 S protein by NTD antibodies DH1053+DH1050.1 combination. In ACE2-positive/FcγR-negative cells, DH1050.1 is neutralizing while DH1053 enhances SARS-COV-2 infection. Both antibodies have no effect in ACE2-negative/FcγR-positive cells. (FIG. 3E) 3D reconstruction of simultaneous recognition of SARS-COV-2 S protein by RBD infection-enhancing antibody+NTD non-infection-enhancing antibody combinations. All of them are neutralizing antibodies in ACE2-positive/FcγR-negative cells. (FIG. 3F) 3D reconstruction of simultaneous recognition of SARS-CoV-2 S protein by three antibody combinations RBD antibody DH1043+RBD antibody DH1047+NTD antibody DH1051 or DH1050.1. Both RBD antibodies are infection-enhancing in ACE2-negative/FcγR-positive cells but neutralizing SARS-COV-2 in ACE2-positive/FcγR-negative cells. DH1051 and DH1050.1 are neutralizing NTD antibodies in ACE2-negative/FcγR-positive cells but have no effect in ACE2-negative/FcγR-positive cells. (FIGS. 3G-H) Effect of combining infection-enhancing RBD and NTD antibodies on SARS-COV-2 pseudovirus infection in ACE2-expressing cells. The infection-enhancing NTD antibody DH1052 was mixed with infection-enhancing RBD antibodies DH1041 (FIG. 3G) or DH1043 (FIG. 3H) in 1:132 ratio or 1:1,325 ratio, respectively. The NTD: RBD antibody mixtures (orange), as well as RBD antibody alone (blue), were five-fold serially diluted and tested for neutralization against SARS-COV-2 D614G pseudoviruse in 293T/ACE2 cells.

[0135] FIGS. 4A-4E show cryo-electron microscopy of neutralizing and non-neutralizing antibodies in complex with SARS-COV-2 Spike ectodomain. Structures of SARS-COV-2 S protein in complex with RBD antibodies (FIG. 4A) DH1041 (red), (FIG. 4B) DH1043 (pink), (FIG. 4C) DH1047 (magenta), (FIG. 4D) neutralizing NTD antibody DH1050.1 (blue), and (FIG. 4E) infection-enhancing NTD antibody DH1052 (green). Each antibody is bound to Spike ectodomain stabilized with 2 proline mutations (S-2P) shown in gray with its Receptor Binding Motif (RBM) colored purple blue. (Right) Zoomed-in views of the antibody interactions with S-2P trimers. The antibody complementarity determining (CDR) loops are colored: HCDRI yellow, HCDR2 limon, HCDR3 cyan, LCDR1 orange, LCDR2 wheat and LCDR3 light blue.

[0136] FIGS. 5A-5M show representative data. NTD antibody DH1052 enhances SARS-COV-2 infection in vitro, but does not enhance SARS-COV-2 replication or disease in vivo. (FIGS. 5A-F) Intentionally left blank (FIGS. 5G-L) Reduction of SARS-COV-2 replication and disease by prophylactic administration of an NTD NAb DH1050.1 or an in vitro infection-enhancing NTD Ab DH1052. (FIG. 5G) Study design. Cynomolgus macaques (n=5 per group) were infused with DH1052, DH1050.1 or an irrelevant control CH65 antibody 3 days before 105 PFU of SARS-CoV-2 challenge via intranasal route and intratracheal route. Viral load including viral RNA and subgenomic RNA (sgRNA) were measured on the indicated pre-challenge and post-challenge timepoints. Lungs were harvested on Day 4 post-challenge for histopathology study. (FIG. 5H) Lung histopathology. Sections of the left caudal (Lc), right middle (Rm), and right caudal (Rc) lung were evaluated and scored for the presence of inflammation by hematoxylin and eosin (H&E) staining, and for the presence of SARS-COV-2 antigen by immunohistochemistry (IHC) staining. Dots indicate the sums of Lc, Rm, and Rc scores in each animal. (FIGS. 5I-J) SARS-COV-2 (FIG. 1) envelope gene (E gene) sgRNA and (FIG. 5J) nucleocapsid gene (N gene) sgRNA in bronchoaveolar lavage (BAL) on Day 2 and Day 4 post challenge. (FIGS. 5K-L) SARS-COV-2 (FIG. 5K) E gene sgRNA and (FIG. 5L) N gene sgRNA in nasal swab on Day 2 and Day 4 post challenge. Statistical significance in all the panels were determined using Wilcoxon rank sum exact test. Asterisks show the statistical significance between indicated group and CH65 control group: ns, no significance, *P<0.05, ** P<0.001, *** P<0.0001.

[0137] FIGS. 6A-6K show representative graphs of data. The Fc-dependent infection-enhancing RBD antibodies not enhance but protect mice and non-human primates from SARS-COV-2 challenge. (FIGS. 6A-D) Intentionally left blank (FIGS. 6E-J) RBD NAbs and infection-enhancing Abs protected SARS-COV-2 infection in non-human primates. (FIG. 6E) Study design. Cynomolgus macaques (n=5 per group) were infused with DH1041, DH1043, DH1046, DH1047 or an irrelevant CH65 antibody 3 days before 105 PFU of SARS-COV-2 challenge via intranasal route and intratracheal route. Viral load including viral RNA and subgenomic RNA (sgRNA) were measured on the indicated pre-challenge and post-challenge timepoints. Lungs were harvested on Day 4 post-challenge for histopathology study. (FIGS. 6F-G) Lung histopathology. Sections of the left caudal (Lc), right middle (Rm), and right caudal (Rc) lung were evaluated and scored for (FIG. 6F) the presence of inflammation by hematoxylin and eosin (H&E) staining, and (FIG. 6G) for the presence of SARS-COV-2 antigen by immunohistochemistry (IHC) staining. Dots indicate the sums of Lc, Rm, and Rc scores in each animal. (FIGS. 6H-I) SARS-COV-2 (FIG. 6H) envelope gene (E gene) sgRNA and (I) nucleocapsid gene (N gene) sgRNA in bronchoaveolar lavage (BAL) on Day 2 and Day 4 post challenge. (FIGS. 6J-K) SARS-COV-2 (FIG. 6J) E gene sgRNA and (FIG. 6K) N gene sgRNA in nasal swab on Day 2 and Day 4 post challenge. Statistical significance in all the panels were determined using Wilcoxon rank sum exact test. Asterisks show the statistical significance between indicated group and CH65 control group: ns, no significance, *P<0.05, ** P<0.001.

[0138] FIGS. 7A-7D show graphs of representative data. The Fc-dependent infection-enhancing RBD antibodies not enhance but protect mice and non-human primates from SARS-COV-2 challenge. (FIGS. 7A-D) Intentionally left blank (FIGS. 7E-J) RBD NAbs and infection-enhancing Abs protected SARS-COV-2 infection in non-human primates. (FIG. 7E) Study design. Cynomolgus macaques (n=5 per group) were infused with DH1041, DH1043, DH1046, DH1047 or an irrelevant CH65 antibody 3 days before 105 PFU of SARS-COV-2 challenge via intranasal route and intratracheal route. Viral load including viral RNA and subgenomic RNA (sgRNA) were measured on the indicated pre-challenge and post-challenge timepoints. Lungs were harvested on Day 4 post-challenge for histopathology study. (FIGS. 7F-G) Lung histopathology. Sections of the left caudal (Lc), right middle (Rm), and right caudal (Rc) lung were evaluated and scored for (FIG. 7F) the presence of inflammation by hematoxylin and eosin (H&E) staining, and (FIG. 7G) for the presence of SARS-COV-2 antigen by immunohistochemistry (IHC) staining. Dots indicate the sums of Lc, Rm, and Rc scores in each animal. (FIGS. 7H-I) SARS-COV-2 (FIG. 7H) envelope gene (E gene) sgRNA and (FIG. 71) nucleocapsid gene (N gene) sgRNA in bronchoaveolar lavage (BAL) on Day 2 and Day 4 post challenge. (J-K) SARS-COV-2 (FIG. 7J) E gene sgRNA and (FIG. 7K) N gene sgRNA in nasal swab on Day 2 and Day 4 post challenge. Statistical significance in all the panels were determined using Wilcoxon rank sum exact test. Asterisks show the statistical significance between indicated group and CH65 control group: ns, no significance, *P<0.05, ** P<0.001.

[0139] FIGS. 8A-8D show flow cytometry plots. Isolation of SARS-COV-2-reactive antibodies from single cell-sorted plasmablasts and memory B cells. (FIG. 8A) Flow cytometry gating strategy for unbiased plasmablasts sorting. At day 11 and day 15 post onset of COVID-19 symptom, plasmablasts (CD14/CD16/CD3/CD235a/CD19⁺/CD20^{low}/IgD/CD27^{high}/CD38^{high}) from a SARS-COV-2 donor. (FIGS. 8B-D) Flow cytometry gating strategy for antigen specifc-memory B cells sorting. Antigen specific B cells from SARS-COV-1 and SARS-COV-2 donors were sorted with different combinations of the SARS-COV-2 S-2P, RBD, NTD probes. Representative data for sorting Spike double positive (FIG.B), Spike⁺ or NTD⁺ (Panel C), as well as RBD⁺ or NTD⁺ (Panel D) subsets were shown.

[0140] FIGS. 9A-91 show graphs of representative data. Neutralization activities of the RBD and NTD antibodies. (FIGS. 9A-D) Neutralization activity of RBD antibodies. (FIG. 9A) Proportion of SARS-COV-2 RBD antibodies (n=81) that exhibited detectable neutralization in the microneutralization assay. (FIG. 9B) Neutralization IC50 and IC80 of RBD neutralizing antibodies (NAbs) against pseudotyped SARS-COV-2. (FIG. 9C) Microneutralization titer, plaque reduction neutralization test (PRNT) IC50 and IC80 of RBD NAbs against replication-competent SARS-COV-2. Microneutralization titer was defined as the lowest antibody concentration that neutralize all the virus, or 99% inhibitory concentration (IC99). Antibodies with undetectable microneutralization titers are shown as gray symbols and nAbs are represented by blue symbols. (FIG. 9D) RBD NAbs blocking of ACE2 binding to SARS-COV-2 Spike(S) protein. Blocking titer is shown as IC50. (FIGS. 9E-F) Correlation analysis of RBD antibodies between neutralization and ACE2 blocking activities. Spearman correlation analysis were performed for (FIG. 9E) ACE2 blocking IC50 vs. PV neutralization IC50, as well as (F) for ACE2 blocking IC50 vs. SARS-COV-2 neutralization titers (indicated by the lowest concentration that shows no CPE). Purified RBD antibodies in Table S1 and S2 that have pseudovirus neutralization data (n=59) or SARS-COV-2 micro-neutralization assay data (n=80) were used in this analysis. P-value and r were indicated for each figures. (FIGS. 9G-I) Neutralization activity of NTD antibodies. (FIG. 9G) Proportion of SARS-COV-2 NTD antibodies (n=41) that exhibited detectable neutralization in the microneutralization assay. (FIG. 9H) Neutralization IC50 and IC80 of NTD neutralizing antibodies against pseudotyped SARS-COV-2. (FIG. 91) Microneutralization titer, PRNT IC50 and IC80 of NTD neutralizing antibodies against replication-competent SARS-COV-2. Antibodies with undetectable microneutralization titers are shown as gray symbols and neutralizing antibodies are represented by orange symbols. Horizontal bars represent the geometric means for each group of antibodies.

[0141] FIGS. 10A-10D show ELISA binding curves of down-selected antibodies. Different SARS-COV-2 or other CoV viral antigens were coated on plates and detected with serial diluted

[0142] (FIG. 10A) RBD infection-enhancing antibodies, (FIG. 10B) RBD non-infection-enhancing antibodies, (FIG. 10C) NTD infection-enhancing antibodies, and (FIG. 10D) NTD non-infection-enhancing antibodies.

[0143] FIGS. 11A-11H show neutralization of SARS-COV-2 and SARS-COV-1 antibodies. (FIGS. 10A-B) Neutralization curves for RBD antibodies against pseudotyped (Panel A) and replication-competent (FIG. 10B) SARS-COV-2. (FIGS. 10C-D) Neutralization curves for NTD antibodies against pseudotyped (FIG. 10C) and replication-competent (FIG. 10D) SARS-COV-2. (FIGS. 10E-H) Neutralization curves for cross-neutralizing antibodies against pseudotyped (FIG. 10E) and replication-competent (FIG. 10F) SARS-COV-2, SARS-COV-1 nanoluciferase (nLuc) virus (FIG. 10G), and Bat WIV1-CoV nLuc virus (FIG. 10H).

[0144] FIGS. 12A-121 show graphs of kinetics of RBD and NTD antibody Fabs on Spike-2P were measured by SPR (Panels A-I).

[0145] FIGS. 13A-I show graphs of kinetics of RBD and NTD antibody Fabs on HexaPro were measured by SPR (Panels A-I).

[0146] FIG. 14 shows a table of affinity of RBD and NTD antibody Fabs.

[0147] FIG. 15 shows autoreactivity tests of SARS-COV-2 RBD and NTD antibodies by AtheNA assay. A panel of different antigens (SS/A, SS/B, Sm, RNP, Jo-1, Scl-70, dsDNA, Centromere B and Histone) were tested.

[0148] FIGS. 16A-16C show comparison of RBD epitopes from NSEM. (FIG. 16A) A spike model (PDB 6ZGE) and corresponding Fab homology models were manually docked and rigidly fit into each negative stain density map. (FIG. 16B) The RBD of each model is enlarged and shown as a white surface, with the putative epitope of each antibody colored. Black outline indicates the ACE2 binding footprint. (FIG. 16C) Comparison to ACE2 footprint and epitopes of three published antibodies with similar epitopes. See main text for references.

[0149] FIGS. 17A-17C show comparison of NTD epitopes from NSEM. (FIG. 17A) A spike model (PDB 6ZGE) and corresponding Fab homology models were manually docked and rigidly fit into each negative stain density map. (FIG. 17B) The NTD of each model is enlarged and shown as a white surface, with the epitope of each antibody colored. Orange outline indicates the epitope of antibody 4A8, shown at bottom right. Outlines illustrate that the neutralizing antibodies DH1048-51 share the same epitope, whereas the infection-enhancing antibodies DH1053-56 bind a distinct epitope. (FIG. 17C) The model of spike complex with Fab 4A8 (orange ribbons, PDG 7C2L) is rigidly fit into each of the NSEM maps (transparent surfaces). The close fit of 4A8 into DH1049, DH1050.1 and DH1050.2 indicate theses have the same approach angle as 4A8, whereas DH1048 and DH1051 have slightly different approaches.

[0150] FIGS. 18A-18J shows ross-blocking assay of RBD and NTD neutralizing antibodies. (FIG. 18A) Scheme of cross-blocking decection assay by SPR. Capture antibody was immoblized on sensor chip, followed by injection of SARS-COV-2 Spike and then immediately injection of detection antibodies. Human antibody CH65 was used as negative control antibody in all SPR experiments. (FIGS. 18B-D) RBD antibodies DH1041 (FIG. 18B), DH1043 (FIG. 18C), or DH1044 (FIG. 18D) was immoblized as capture antibodies to test cross-blocking with different detection antibodies. Three independent experiments were shown. (FIGS. 18E,F) RBD cross-reactive antibodies DH1046 (FIG. 18E) or DH1046 (FIG. 18F) was immoblized as capture antibodies to test cross-blocking with different detection antibodies as indicated. (G-J) NTD antibodies DH1048 (FIG. 18G), DH1050.1 (FIG. 18H), DH1051 (FIG. 181), or NTD ADE antibody DH1052 (FIG. 18J) was immoblized as capture antibodies to test cross-blocking with different detection antibodies. Two or three independent experiments were shown.

[0151] FIGS. 19A-19F show ross-blocking assay of RBD and NTD neutralizing antibodies (Related to FIG. 3C). (FIG. 19A) Scheme of cross-blocking decection assay by SPR. Capture antibody was immoblized on sensor chip, followed by injection of SARS-COV-2 Spike and then immediately injection of detection antibodies. Human antibody CH65 was used as negative control antibody in all SPR experiments. (FIGS. 19B-G) SPR cross-blocking assays. NTD NAb DH1050.1 (FIG. 19B), NTD infection-enhancing abs DH1052 (FIG. 19C), DH1053 (FIG. 19D), DH1054 (FIG. 19E), DH1055 (FIG. 19F) or DH1056 (FIG. 19G) was immoblized as capture antibodies to test cross-blocking with different detection antibodies.

[0152] FIG. 20 shows heavy and light chain amino acid sequences of antibodies in Tables 3, 4A and 5. The VH and VL sequences are highlighted in grey. CDRs can be identified by any method known in the art. In some embodiment, CDRs as identified are identified using IMGT. Sequence ID numbers are shown in the figure.

[0153] FIG. 21 shows one embodiment of heavy and light chain nucleic acid sequences of antibodies in Tables 3, 4A and 5. The VH and VL sequences are highlighted in grey. Sequence ID numbers are shown in the figure.

[0154] FIG. 22 shows heavy and light chain amino acid sequences of antibodies in Table 4B. The VH and VL sequences are highlighted in grey. CDRs can be identified by any method known in the art. In some embodiment, CDRs as identified are identified using IMGT. Sequence ID numbers are shown in the figure.

[0155] FIG. 23 shows one embodiment of nucleic acid sequences of FIG. 22. The VH and VL sequences are highlighted in grey. Sequence ID numbers are shown in the figure.

[0156] FIGS. 24A-F show COVID Antibody Sequences in in vitro transcription (IVT) plasmids. Sequences of DH1041, DH1043, and DH1042 in In Vitro Transcription (IVT) Plasmids. DNA/mRNA/AA sequences for modified RNA delivery.

[0157] FIG. 25 shows maps and sequences of In Vitro Transcription (IVT) Plasmids.

[0158] FIG. 26 shows graphs of representative data. Effect of combining infection-enhancing RBD and NTD antibodies on SARS-COV-2 pseudovirus infection in ACE2-expressing cells (related to FIG. 3G-H). The infection-enhancing NTD antibody DH1052 was tested alone (FIG. 26A) or mixed with infection-enhancing RBD antibodies DH1041 (FIG. 26B) or DH1043 (FIG. 26C) in 1:12.5 ratio or 1:13250 ratio, respectively. The NTD: RBD antibody mixtures (orange), as well as RBD antibody alone (blue), were five-fold serially diluted and tested for neutralization against SARS-COV-2 D614G pseudoviruse in 293T/ACE2 cells.

[0159] FIG. 27 shows cryo-EM data collection and refinement statistics.

[0160] FIG. 28 shows cryo-EM data processing details. (left) Representative micrograph, (middle) CTF fit and (right) Representative 2D class averages for (FIG. 28A) DH1041-Spike-2P (S2P) complex, (FIG. 28B) DH1043-S2P complex, (FIG. 28C) DH1047-S2P complex, (FIG. 28D) DH1050.1-S2P complex, (FIG. 28E) DH1052-S2P complex.

[0161] FIG. 29 shows global and Local map resolutions for DH1041/S-2P complex. (FIG. 29A) Cryo-EM reconstruction of DH1041 bound to 1-RBD-up 2P spike. (FIG. 29B) Cryo-EM reconstruction of DH1041 bound to 2-RBD-up 2P spike. (FIG. 29C) Cryo-EM reconstruction of DH1041 bound to 3-RBD-up 2P spike.

[0162] FIG. 30 shows global and Local map resolutions for DH1043/S-2P complex. (FIG. 30A) Cryo-EM reconstructions of DH1043 bound to 1-RBD-up 2P spike Top two rows show refined maps, bottom row shows the FSC curve for each corresponding map. (FIG. 30B) Refined cryo-EM map that was used for model building colored by local resolution. (FIG. 30C) Zoomed-in view of the DH1043 interface with RBD. The cryo-EM map is shown as a blue mesh with underlying fitted model shown in cartoon representation, with the DH1047 HCDRI loop colored yellow, HCDR2 colored limon and HCDR3 cyan.

[0163] FIG. 31 shows global and Local map resolutions for DH1047/S-2P complex. (FIG. 31A) Cryo-EM reconstructions of DH1047 bound to 3-RBD-up 2P spike. Top two rows show refined maps, bottom row shows the FSC curve for each corresponding map. (FIG. 31B) Refined cryo-EM map that was used for model building colored by local resolution. (FIG. 31C) Zoomed-in view of the DH1047 interface with RBD. The cryo-EM map is shown as a blue mesh with underlying fitted model shown in cartoon representation, with the DH1047 HCDRI loop colored yellow, HCDR2 colored limon, HCDR3 cyan and LCDR1 orange.

[0164] FIG. 32 shows global and Local map resolutions for DH1050.1/S-2P complex. (FIG. 32A) Cryo-EM reconstruction of DH1050.1 bound to 3-RBD-down 2P spike. (FIG. 32B) Fourier shell correlation curves. (FIG. 32C) Refined cryo-EM map colored by local resolution for the DH1050.1 bound to 3-RBD-down 2P spike. (FIG. 32D) Cryo-EM reconstruction of DH1050.1 bound to 1-RBD-up 2P spike. (FIG. 32E) Fourier shell correlation curves. (F) Refined cryo-EM map colored by local resolution for the DH1050.1 bound to 1-RBD-up 2P spike.

[0165] FIG. 33 shows lobal and Local map resolutions for DH1052/S-2P complex. (FIG. 33A) Cryo-EM reconstruction of DH1052 bound to 3-RBD-down stabilized Spike “2P” (S-2P). (FIG. 33B) Fourier shell correlation curves. (FIG. 33C) Refined cryo-EM map colored by local resolution for the DH1052 bound to 3-RBD-down S-2P. (FIG. 33D) Cryo-EM reconstruction of DH1052 bound to 1-RBD-up S-2P. (FIG. 33E) Fourier shell correlation curves. (FIG. 33F) Refined cryo-EM map colored by local resolution for the DH1052 bound to 1-RBD-up S-2P.

[0166] FIG. 34 shows pathology scoring of the non-human primates that treated with RBD or NTD NAbs and infected with SARS-COV-2 (Related to FIGS. 5H-I and 6F-G). Lung histopathology. Sections of the left caudal (Lc), right middle (Rm), and right caudal (Rc) lung were evaluated and scored in a 1-4 scoring system for the presence of inflammation by Hematoxylin and eosin (H&E) staining, and for the presence of SARS-COV-2 antigen by Immunohistochemistry (IHC) staining. The sums of scores for Lc, Rm, and Rc sections were shown in the table and shown as dot plots in FIG. 5-6.

[0167] FIG. 35 shows lung histopathology of antibody-treated and SARS-COV-2 challenged cynomolgus macaques. (FIG. 35A) Representative images of hematoxylin and eosin (H&E) staining and SARS-COV-2 antigen immunohistochemistry (IHC) staining from each group. All images were taken at 10× magnification. The images in this presentation are representative of the average severity of pathologic processes observed and recorded during microscopic evaluation. Red arrows indicate SARS-COV-2 infection foci. (FIG. 35B) Following microscopic evaluation of DH1052, 1 animal (BB536A) out of 5 animals in this group exhibited histologic features that was substantially more severe than the rest of the cohort and may suggest some degree of antibody-mediated disease enhancement. The features were characterized by prominent perivascular mononuclear inflammation (*) and a substantial amount of perivascular and alveolar edema (fluid; X). These findings suggest a vaso-centric process with some degree of altered vascular permeability. The remaining 4 animals in DH1052 group had inflammatory changes that ranged from minimal to moderate severity and more infiltrates were mixed and predominantly polymorphonuclear with lesser mononuclear cell involvement and present in the alveolar spaces.

[0168] FIG. 36 shows graphs of representative data. SARS-COV-2 total viral RNA and subgenomic RNA (sgRNA) in non-human primates that treated with RBD or NTD NAbs and infected with SARS-COV-2 (Related to FIGS. 5 and 6). Cynomolgus macaques (n=5 per group) were infused with RBD or NTD neutralizing antibodies 3 days before 105 PFU of SARS-COV-2 challenge. An irrelevant human antibody CH65 was used as a negative control. Viral load including viral RNA and subgenomic RNA (sgRNA) were measured on the indicated pre-challenge and post-challenge timepoints. Statistical significance in all the panels were determined using Wilcoxon rank sum exact test (ns, no significance, *P<0.05, ** P<0.001, *** P<0.0001). (FIGS. 36A,B) SARS-COV-2 (FIG. 36B) envelope gene (E gene) sgRNA and (FIG. 36C) nucleocapsid gene (N gene) sgRNA in nasal wash samples on Day 2 and Day 4 post challenge. (FIG. 36C) SARS-COV-2 E gene total (genomic+subgenomic) viral RNA in BAL samples on Day 2 and Day 4 post challenge. (FIG. 36D) SARS-COV-2 E gene total (genomic+subgenomic) viral RNA in nasal swab samples on Day 2 and Day 4 post challenge. (FIG. 36E) SARS-COV-2 E gene total (genomic+subgenomic) viral RNA in nasal wash samples on Day 2 and Day 4 post challenge.

[0169] FIG. 37 shows schematics and tables for cross-neutralizing RBD antibodies against SARS-COV-1 and SARS-related bat WIV1-CoV. (FIG. 37A) Maximum likelihood tree of Spike amino acid sequences for SARS-related group 2B and group 2C coronaviruses. (FIGS. 37B) Monoclonal RBD, NTD and S2 antibody ELISA binding titer for soluble S protein ectodomains from human and animal SARS-related coronaviruses, human circulating coronaviruses and

[0170] MERS. Titers are log area-under-the-curve (AUC). (FIG. 37C) Summary of cross-neutralizing antibodies against SARS-COV and/or bat WIV1-CoV.

[0171] FIG. 38 shows tables of ELISA screening of IgH/L transient transfection products recovered from COVID-19 and SARS donors. 38A contain data derived from SARS-Cov-1 donor memory B cells and show gene analysis data and reactivity with proteins, respectively. The antibodies were not reactive with MERS-COV, Coronavirus spike S1+S2 (Baculovirus-Insect Cells, His), MERS-COV Coronavirus spike S2 (Baculovirus-Insect Cells, His), Recombinant MERS-COV Spike/S1 Protein (S1 subunit, aa 1-725. His), MERS-COV Coronavirus spike RBD (Baculovirus-Insect Cells, His), Candida Albicans, biotin-Man9 (Strep), strep only control (superblock) subtracted, and Strep only control (Glycan) subtracted. 38B contains data derived from SARS-COV-2 donor plasmablasts. 38C contain data derived from SARS-COV-2 donor memory B cells.

[0172] FIG. 39 shows a table of COVID-19 RBD neutralizing antibodies (n=44).

[0173] FIG. 40 shows a table of COVID-19 RBD non-neutralizing antibodies (n=37).

[0174] FIG. 41 shows a table of COVID-19 NTD neutralizing antibodies (n=10).

[0175] FIG. 42 shows a table of COVID-19 NTD non-neutralizing antibodies (n=31).

[0176] FIG. 43 shows a table of COVID-19 S2 antibodies (n=65).

[0177] FIG. 44 shows a table of Cross-reactive COVID-19 antibodies (n=80).

[0178] FIG. 45 shows tables for all antibodies with Ig gene analysis. FIG. 45A shows COVID-19 RBD NAbs (n=44). FIG. 45B shows COVID-19 RBD non-NAbs (n=37). FIG. 45C shows COVID-19 NTD NAbs (n=10). FIG. 45D shows COVID-19 NTD non-Abs (n=31).

[0179] FIG. 45E shows COVID-19 S2 Abs (n=65). FIG. 45F show Cross-reactive Abs (n=80).

[0180] FIGS. 46A-C show amino acid and nucleic acid sequences of antibody DH1159.2. (A). In (A) Vh and VI are represented by the grey shaded sequences. CDRs are underlined. FIG. 26B-C show nucleic acid sequences of Vh and VI chains of antibody DH1073 and antibody DH1235 (B), and amino acid sequences of Vh and VI chains of antibody DH1073 and antibody DH1235 (C). In all panels CDRs per IMGT are underlined. Sequence ID numbers are shown in the figure.

[0181] FIG. 47 shows (A) clinical symptom score, (B) SARS-COV-2 viral load in nasal swab material and (C) serum antibody response for Donor ID #450905. Donor selected for cell sorting and antibody isolation.

[0182] FIG. 48 shows ELISA binding assays with transiently expressed antibody which demonstrates that DH1042 is SARS-COV-2 RBD specific.

[0183] FIG. 49 shows NESEM model of DH1042 Fab complexed with SARS-COV-2 spike trimer (A). The DH1042 putative epitope is the loop formed by residues 481-491 in the RBD of the spike (B) and (C). Red=epitope footprint within RBD, Blue highlight=secondary contacts.

[0184] FIGS. 50A-C show percent neutralization curves for A) SARS-COV-2 G614 pseudovirus, B) SARS-COV-2 D614 PRNT (Duke Regional Biocontainment Laboratory) and C) SARS-COV-2 D614 PRNT Bioqual vendor lab). DH1042 reaches 100% inhibition in all 3 assays.

[0185] FIG. 51 shows SPR kinetic response of DH1042 (Fab) binding to a titration of SARS-CoV-2 spike (2-50 mM).

[0186] FIG. 52 shows SPR kinetic response of DH1042 binding to a titration of: A) FcgRI/CD64, B) FcgRIIA/CD32a, and C) FcgRIIIA/CD16a. DH1042 was captured on a CM5 chip. BSA used as negative control surface. Fcgamma Receptors used: rhFcγRI/CD64 Lot: MOM2118911 MW: 31.4 kDa; rhFcγRIIA/CD32a Lot: MAC1717021 MW: 22 kDa; rhFcγRIIIA/CD16a Lot: QMI1919121 MW: 22.6 kDa, rhFcg Receptor Fab kinetics method: High performance injection with a flow rate of 50 uL/min, Injection duration was 300s, dissociation duration was 600s. Chip regeneration: 1 injection of 12s Gly2.0 at flow rate of 50 uL/min. The running buffer was 1× PBS.

[0187] FIG. 53 shows Representative IFA staining of HEP-2 cells with DH1042, two isotype control antibodies and a positive control antibody.

[0188] FIG. 54 shows DH1042 Heavy and Light Chain plasmids run uncut on a 1% agarose gel.

[0189] FIG. 55 shows dsRNA slot blot. Sample load (200 ng) versus blank. New England Bio (NEB) custom dsRNA ladder. Slots 1, 2, 5, and 6 are not relevant to DH1042.

[0190] FIG. 56 shows Lipid Nanoparticle (LNP) encapsulation analytical report for DH1042 (Ab026103) mRNA for pre-clinical studies.

[0191] FIG. 57 shows Pharmacokinetics of DH1042 when delivered as recombinant protein via 2 routes IV (A) and IM (B) to Tg32 mice, at two different doses.

[0192] FIG. 58 shows Pharmacokinetics of DH1042 when delivered as mRNA-LNP to Tg32 mice, at three different doses.

[0193] FIG. 59 shows DH1042 mRNA-LNP1 Expression and challenge studies in Hamsters. (A-D) IV administration of DH1042 mRNA-LNP produces functional antibody in serum with a 6.7 day half-life in hamsters. In serum (A-B), Thalf is 6.7 days and Tmax is 1.2 days. C-D shows lung. (E-G) Hamster SARS-COV-2 Challenge Study, PrEP with DH1042 mRNA-LNP1 (IV; 0.1. 0.5, 1.0 mg/kg)-WA1 Strain, and weight change. IV administration of DH1042 mRNA-LNP protects hamsters from challenge with wt SARS-Cov-2.

[0194] FIG. 60 shows DH1042 Ab protein protects/reduces viral load in SARS-COV-2 aged mouse challenge models. A) Pre exposure model timeline and Day 4 post challenge viral load as determined by plaque assay. B) Post exposure treatment model timeline and Day 4 post infection viral load as determined by plaque assay.

[0195] FIG. 61 shows DH1042 mRNA-LNP protects/reduces viral load in SARS-COV-2 hamster challenge model. Pre exposure model timeline, weight loss and in life oral swab post challenge viral load.

[0196] FIGS. 62A-B shows DH1041 Ab protein protects/reduces viral load in SARS-COV-2 aged mouse challenge models. A) Pre exposure model timeline and Day 2 post challenge viral load as determined by plaque assay. B) Post exposure treatment model timeline and Day 2 post infection viral load as determined by plaque assay.

[0197] FIGS. 63A-D show DH1041 and DH1043 mAb protein protect/reduce viral load in SARS-COV-2 NHP challenge model. A) Timeline of pre-exposure protection model and viral load sampling. B) Serum antibody levels on day of challenge. C) sgRNA E gene levels in day 2 and 4 BAL and nasal wash samples. D) sgRNA N gene levels in day 2 and 4 BAL and nasal wash samples.

[0198] FIG. 64 shows SARS-COV-2 spike(S) protein ectodomains for characterizing structures and antigenicity of S protein variants. Domain architecture of the SARS-COV-2 spike protomer. The SI subunit contains a signal sequence (SS), the NTD (N-terminal domain, pale green), N2R (NTD-to-RBD linker, cyan), RBD (receptor-binding domain, red), SD1 and SD2 (subdomain 1 and 2, dark blue and orange) subdomains. The S2 subunit contains the FP (fusion peptide, dark green), HR1 (heptad repeat 1, yellow), CH (central helix, teal), CD (connector domain, purple) and HR2 (heptad repeat 2, grey) subdomains. The transmembrane domain™ and cytoplasmic tail (CT) have been truncated and replaced by a foldon trimerization sequence (3), an HRV3C cleavage site (HRV3C), a His-tag (His) and strep-tag (Strep). The D614G mutation is in the SD2 domain (yellow star, green contour). The S1/S2 furin cleavage site (RRAR) has been mutated to GSAS (blue lightning). The substitutions in each variant are indicated by blue stars. * A few ectodomain constructs were prepared on the B.1.351 spike backbone; these differed in their NTD mutations. Binding data for the other constructs, including the one representing the dominant circulating form [L18F,D80A,D215G,A242-244,K417N,E484K,N501Y,D614G,A701V] are shown in FIG. S2 and S3. The construct shown here was used for determining the cryo-EM structure. The “P.1-like” spike was prepared in the P.1 backbone but retained the K417N RBD substitution (instead of the K417T in the P.1 spike; see FIG. 64).

[0199] FIGS. 65A-J show binding of ACE2 receptor ectodomain (FIG. 65A), DH1041 (FIG. 65C), DH1043 (FIG. 65B) and DH1047 (FIG. 65D) which are RBD-directed antibodies, DH1050.1 (FIG. 65E), DH1050.2 (FIG. 65G) and DH1052 (FIG. 65F) (NTD-directed), DH1058 (FIG. 65H) and 2G12 (FIG. 651) (S2 directed) to spike variants measured by SPR. The bar graphs represent the response levels (RU) after 20 seconds of dissociation. Data shown are representative of two independent experiments. Multiple ectodomain constructs in the B.1.351 spike backbone were tested that differed in their NTD mutations. The 242-244 deletion is carried in most circulating B.1.351 variants, and the R246I mutation is important because it is included in many reagent panels as the B.1.351 representative, but rare in nature with a transient local appearance in a small number of cases in South Africa in late 2020. In a sampling window of GISAID between December 1-May 24, B.1.351 with R246I was found five times, a B. 1.351 form of spike that did not have the deletion at 242-244 was found 24 times, and most common baseline form of spike [L18F,D80A,D215G,D242-244,K417N,E484K,N501Y,D614G,A701V], which has spread globally, was found 2,736 times. Our data showed that the NTD 242-244 deletion and the R246I substitution both impact the binding of NTD-directed antibodies, with the 242-244 deletion having a greater effect. These NTD changes also affect the binding of RBD directed nAbs DH1041 and DH1043, where the R246I substitution has a greater deleterious effect than the 242-244 deletion. Figure S2J shows the identity of spike constructs tested for binding and represented by each bar in Figures S2A-S2I. In FIGS. 65A-I, in order of appearance from left to right, each bar shows binding to a spike variant construct labeled 1-15 as listed in FIG. 65J. For the SPR assay spike variants were captured on a Series S Strepavidin (SA) chip. Fabs were then injected at 200 nM with a contact time of 60s and a dissociation time of 120s (50 uL/min).

[0200] FIGS. 66A-C shows binding of ACE2 receptor ectodomain (FIG. 66A), DH1041 (FIG. 66A), DH1043 (FIG. 66A) and DH1047 (FIG. 66B) (RBD-directed), DH1050.1 (FIG. 66A) (NTD-directed), to spike variants measured by ELISA. In the ELISA assay, serially diluted spike protein was bound in individual wells of 384-well plates, which were previously coated with streptavidin. Proteins were incubated and washed, then antibodies at 10 ug/ml or ACE2 with a mouse Fc tag at 2 ug/ml were added. Antibodies were incubated, washed and binding detected with goat anti-human-HRP. Multiple ectodomain constructs representing the B.1.351 spike were tested that differed in their NTD mutations. The ELISA data mirror the SPR data and show that the NTD 242-244 deletion and the R246I substitution both impact the binding of NTD-directed antibodies, with the 242-244 deletion having a greater effect. These NTD amino acid substitutions also affected the binding of RBD directed nAbs DH1041 and DH1043, where the R246I substitution showed a greater deleterious effect than the 242-244 deletion. Data shown are representative of two independent experiments. FIG. 66C lists the spike construct used in the ELISA assay depicted in the last panel.

[0201] FIG. 67 shows representative schematics and graphs in the identification of broadly neutralizing antibodies. (FIG. 67A) The genetic relationships of ACE2 and non-ACE2 using Sarbecovirus receptor binding domains. SARS-COV-2 2AA MA is shown in purple, SARS-COV is shown in orange, WIV-1 is shown in pink, and RsSHC014 is shown in green. The neutralization activity against sarbecoviruses is shown for (FIG. 67B) DH1235, (FIG. 67C) DH1073, (FIG. 67D) DH1046, and (FIG. 67E) DH1047.

[0202] FIG. 68 the binding breadth and structural determinants of broad neutralization. The binding activity of cross-reactive antibodies against SARS-COV spike, SARS-COV-2 spike, SARS-COV-2 RBD, Pangolin GXP4L spike, RaTG13 spike, and RsSHC014 spike of (FIG. 68A) DH1235, (FIG. 68B) DH1073, (FIG. 68C) DH1046, and (FIG. 68D) DH1047. (FIG. 68E) Cryo-EM reconstruction of DH1047 Fab bound to SARS-COV spike shown in grey, with the underlying fitted model shown in cartoon representation. DH1047 is colored green, the RBD it is bound to is colored black with the Receptor Binding Motif within the RBD colored purple. Overlay of DH1047 bound to SARS-COV-1 and SARS-COV-2 (PDB ID: 7LDI) S proteins. Overlay was performed with the respective RBDs. DH1047 bound to SARS-COV and SARS-COV-2 spike is shown in green and salmon, respectively. ACE2 (yellow surface representation, PDB 6VW1) binding to RBD is sterically hindered by DH1047. The views in panels B and C are related by a ˜180° rotation about the vertical axis. (FIG. 68F) Sequence conservation within the DH1047 HCDR3 and LCDR3s among 23 sarbecoviruses.

[0203] FIGS. 69A-H Prevention and therapy of DH1047 against SARS-COV in aged mice. (FIG. 69A) SARS-COV mouse-adapted 15 (MA15) lung viral replication in the prophylactically treated (−12 hours before infection) mice with a control influenza mAb CH65 and the four broadly neutralizing antibodies DH1235, DH1073, DH1046, DH1047. Days post infection (dpi). Limit of detection (LoD). (FIG. 69B) % Starting weight of prophylactic (−12 hours before infection) and therapeutic (+12 hours after infection) treatment with DH1047 and control against SARS-COV MA15 in mice. (FIG. 69C) Lung viral replication of SARS-COV MA15 in mice treated prophylactically and therapeutically with DH1047 and control at 4 days post infection. (FIG. 69D) Macroscopic lung discoloration scores in mice treated with DH1047 and control prophylactically and therapeutically. (FIG. 69E) Lung pathology at day 4 post infection measured by acute lung injury (ALI) scores in mice treated with DH1047 and control prophylactically and therapeutically. (FIG. 69F) Lung pathology at day 4 post infection measured by diffuse alveolar damage (DAD) in mice treated prophylactically and therapeutically with DH1047 and control. (FIG. 69G) Pulmonary function as measured by whole body plethysmography (Buxco) in DH1047 and control mAb prophylactically and therapeutically treated mice. P values are from a 2-way ANOVA after Tukey's multiple comparisons test for the weight loss, and P values are from a 1-way ANOVA following Dunnett's multiple comparisons for the viral titer, and lung pathology readouts. (FIG. 69H) Percent survival in DH1047 prophylaxis, therapy, and control groups.

[0204] FIGS. 70A-D Prophylactic and therapeutic activity of DH1047 against SARS-related bat CoVs and the in vitro neutralization against the SARS-COV-2 variants. (FIG. 70A) Lung viral replication of WIV-1 in mice treated prophylactically and therapeutically with DH1047 and control at 2 days post infection. Days post infection (dpi). Limit of detection (LoD). (FIG. 70B) Lung viral replication of RsSHC014 in mice treated prophylactically and therapeutically with DH1047 and control at 2 days post infection. (FIG. 70C) Live virus neutralization of SARS-COV-2 D614G, B.1.1.7., and B.1.351 variants. (FIG. 70D) The comparison of the DH1047 neutralization activity against SARS-COV-2 variants in pseudovirus and live virus neutralization assays. P values are from a 2-way ANOVA after Tukey's multiple comparisons test for the weight loss, and P values are from a 1-way ANOVA following Dunnett's multiple comparisons for the viral titer, and lung pathology readouts.

[0205] FIGS. 71A-I Prophylaxis and therapy of DH1047 against SARS-COV-2 B.1.351 in mice. (FIG. 71A) % Starting weight of prophylactic (−12 hours before infection) and therapeutic (+12 hours after infection) treatment with DH1047 and control against SARS-COV-2 B.1.351 in mice. (FIG. 71B) Lung viral replication of SARS-COV-2 B.1.351 in mice treated prophylactically and therapeutically with DH1047 and control at 4 days post infection. (FIG. 71C) Macroscopic lung discoloration scores in mice treated with DH1047 and control prophylactically and therapeutically. (FIG. 71D) Lung pathology at day 4 post infection measured by acute lung injury (ALI) scores in mice treated with DH1047 and control prophylactically and therapeutically. (FIG. 71E) Lung pathology at day 4 post infection measured by diffuse alveolar damage (DAD) in mice treated prophylactically and therapeutically with DH1047 and control. P values are from a 2-way ANOVA after Tukey's multiple comparisons test for the weight loss, and P values are from a 1-way ANOVA following Dunnett's multiple comparisons for the viral titer, and lung pathology readouts. (FIG. 71F) Percent survival in DH1047 prophylaxis, therapy, and control groups. (FIG. 71G) % Starting weight in dose de-escalation DH1047 prophylaxis (−12 hours before infection) at 10, 5, and 1 mg/kg and control mAb. (FIG. 71H) Lung viral titers in control and DH1047-treated mice at 10, 5, and 1 mg/kg. (FIG. 711) Lung discoloration in control and DH1047-treated mice at the various mAb doses. (FIG. 71H) DH1047 binding relative to binding of other known antibody classes that bind the RBD. RBD is shown in black with the ACE2 footprint on the RBD colored yellow. DH1047 is shown in cartoon representation and colored green. The other antibodies are shown as transparent surfaces: C105 (pale cyan, Class 1, PDB ID: 6XCN and 6XCA), DH1041 (light blue, Class 2, PDB ID: 7LAA), S309 (wheat, Class 3, PDB ID: 6WS6 and 6WPT) and CR3022 (pink, Class 4, PDB ID: 6YLA).

[0206] FIG. 72 the neutralization activity of DH1047, ADG-2, and REGN 10933 against sarbecoviruses. (A) SARS-COV-2 B.1.351 (B) SARS-COV urbani (C) RsSHC014.

[0207] FIG. 73 the binding activity of cross-reactive antibodies against MERS-COV and human common-cold CoVs. The binding activity of four broadly neutralizing antibodies against SARS-CoV-2 NTD, MERS-COV spike, HCoV-OC43 spike, HCoV-NL63, and HCoV-229E shown for (A) DH1235, (B) DH1073, (C) DH1046, and (D) DH1047.

[0208] FIGS. 74A-74D Coronavirus cross-reactive antibodies exhibit distinct binding modes to SARS-COV-2 receptor binding domain. (FIG. 74A) Three-dimensional reconstruction from negative stain electron microscopic images of DH1073 (purple) in complex with Hexapro stabilized SARS-COV-2 Spike ectodomain (gray). On the left and center the map is shown in two orthogonal views. On the right the map is shown as a transparent surface, rigidly fit with a 1-RBD-up spike model, PDB ID: 6ACK. (FIG. 74B) Three-dimensional reconstruction of DH1235 (blue) in complex with Hexapro stabilized Spike ectodomain (gray). The rigidly fit 3-RBD-up spike model on the right was generated from PDB ID: 6ACK. Fit models in A and B were used to compare the binding of DH1073 and DH1235 to known RBD-directed nAbs. (FIG. 74C) Four orthogonal views of RBD binding by DH1073 (purple) and DH1235 (blue), compared to known RBD nAbs, shown as molecular surface: C105 (pale cyan, Class 1, PDG ID 6XCN and 6XCA), DH1041 (light blue, Class 2, PDB ID: 7LAA), S309 (wheat, Class 3, PDB ID: 7BEP), CR3022 (pink, Class 4, PDB ID: 6W41), and DH1047 (green, PDB ID: 7LD1). The last two views correspond to the same views shown in FIG. 3D in the main text. DH1073 overlaps with DH1235, C105 (Class 1) and CR3022 (Class 4). DH1235 overlaps DH1073, DH1047, C105 and CR3022. (FIG. 74D) Antibody competition for binding to SARS-COV-2 S stabilized with two prolines (S-2P) in surface plasmon resonance assays. The antibody used to capture S-2P is shown as the row title. The antibody flowed over the captured spike is shown as column titles. +, blocking;-, no blocking of binding.

[0209] FIG. 75 NSEM of DH1047 bound to bat RsSHC014 and SARS-COV spike ectodomains. (A) Representative 2D class averages of bat RsSHC014 2P spike ectodomain bound to DH1047 Fab. (B) Overlay of 3D reconstruction of DH1047 bound to bat RsSHC014 2P (grey) and SARS-CoV-2 HexaPro (purple) S ectodomains. (C) Representative 2D class averages of SARS-COV 2P spike ectodomain bound to DH1047 Fab (D) Overlay of 3D reconstruction of DH1047 bound to bat SARS-COV 2P (grey) and SARS-COV-2 HexaPro (purple) S ectodomains. The red boxes in panels A and C indicate the classes that show DH1047 Fab bound to spike.

[0210] FIGS. 76A-76H Cryo-EM data processing for the SARS-COV spike ectodomain bound to DH1047, Related to FIG. 2. (FIG. 76A) Representative cryo-EM micrograph. (FIG. 76B) Cryo-EM CTF fit. (FIG. 76C) Representative 2D class averages from Cryo-EM dataset. (FIG. 76D) Ab initio reconstruction. (FIG. 76E) Refined map. (FIG. 76F) Fourier shell correlation curve. (FIG. 76G) Refined cryo-EM map colored by local resolution. (FIG. 76H) Zoom-in images showing the SD1, NTD, HR1/CH and RBD/Fab contact regions in the structure. The cryo-EM map is shown as a blue mesh and the fitted model is in cartoon representation, with residues shown as stick.

[0211] FIG. 77 the affinity data of DH1047 against SARS-COV and RsSHC014 spikes.

[0212] Surface plasmon resonance (SPR) binding experiments of DH1047 against (A) SARS-COV-2 Toronto and (B) RsSHC014. Binding affinity measurements are shown in the tables and response units (RU) as a function of time in seconds(s) is shown for both SARS-COV and RsSHC014. SPR experiments were repeated twice.

[0213] FIG. 78 lung H+E staining of SARS-COV infected mice. Pathologic features of acute lung injury were scored using two separate tools: the American Thoracic Society Lung Injury Scoring (ATS ALI) system. Using this ATS ALI system, we created an aggregate score for the following features: neutrophils in the alveolar and interstitial space, hyaline membranes, proteinaceous debris filling the air spaces, and alveolar septal thickening. Three randomly chosen high power (×60) fields of diseased lung were assessed per mouse. Representative images are shown from vehicle and RDV-treated mice. All images were taken at the same magnification. The black bar indicates 100 um scale. (A) CH65 control prophylaxis. (B) CH65 therapy. (C) DH1047 prophylaxis. (D) DH1047 therapy.

[0214] FIGS. 79A-79B Comparison of DH1047 binding footprint to that of other RBD-directed Abs that bind overlapping epitopes. (FIG. 79A) RBD is shown in black with ACE2 binding footprint colored yellow. Binding footprints of antibodies DH1047 (PDB: 7LD1), CR3022 (PDB: 6YLA), EY6A (PDB: 6ZCZ), H014 (PDB: 7CAH), COVA1-16 (PDB: 7JMW) and S304 (PDB: 7JW0) are shown in green. (FIG. 79B) Overlay of DH1047 bound RBD to RBD bound to nanobodies VHH V (PDB: 7KN6), VHH W (PDB: 7KN7) and VHH-72 (PDB: 6WAQ)

[0215] FIG. 80A-C Binding of DH1047 mutants to the SARS-COV-2 2P S ectodomain. (FIG. 80A) Binding assays were performed by Biolayer Interferometry in an Octet RED384 (Forte Bio). (Top) Anti-human IgG biosensor tips were dipped into 200 μl of DH1047 WT or mutant proteins for 5 min followed by Imin in 1×PBS. Next, the tips were dipped into 100 nM of SARS-COV-2 2P S ectodomain and binding response was measured. (Bottom) Binding of DH1047 IgG and mutants to SARS-COV-2 2P S ectodomain normalized to the binding observed for DH1047 WT IgG (dotted line). (FIG. 80B) Binding of purified DH1047 WT IgG and selected mutants to SARS-CoV-2 2P S ectodomain measured by Surface Plasmon Resonance in a Biacore T200 (Cytivia). The spike was captured via its C-terminal TwinStreptactin tag on a SA chip. Binding to the antibodies was measured by flowing over 200 nM solutions of the IgG in HBS-EP+buffer. (FIG. 80C) Binding interface of DH1047 to RBD (grey). The DH1047 residues that were mutated are shown as sticks and labeled.

[0216] FIGS. 81A-81B DH1047 and ADG-2 binds the RBD of SARS-Cov and SARS-COV-2 spike ectodomains using a similar footprint. (FIG. 81A) Cartoon representation of DH1047 (colored in pale green) bound to the RBD (grey surface, ACE2 binding site in yellow) of SARS-CoV S ectodomain and ADG-2 (cyan) bound to SARS-COV-2 S ectodomain. The homologous Fab ADI-19425 (PDB 6APC) was docked in the ADG-2 cryo-EM map (EMD-23160) to generate the model. (FIG. 81B) DH1047 and ADG-2 bind partially overlapping binding sites on the RBD. (FIG. 81C) Comparison of the therapeutic activity of DH1047, ADG-2, and control mAb in aged mice infected with SARS-COV-2 B.1.351 including % starting weight, lung viral replication titers, and lung pathology.

[0217] FIG. 82 monoclonal antibody neutralization screen against SARS-COV-2 2AA MA, SARS-COV, WIV-1, and RsSHC014.

[0218] FIG. 83 cryo-EM data collection and refinements statistics.

[0219] FIG. 84 immunogenetic characteristics of broadly cross-reactive mAbs.

[0220] FIG. 85 shows monoclonal antibody neutralization of different variants of SARS-COV-2 pseudovirus. Neutralization titers are shown as IC50 in micrograms per milliliter. The heatmap is color-coded by neutralization potency with potency increasing from green to red.

[0221] FIGS. 86A-B show binding breadth of SARS-COV-2 neutralizing receptor binding domain (RBD) antibodies determined by biolayer interferometry. N-terminal domain and S2 antibodies were used as negative controls. Bars in (A) show binding to SARS-COV-2 HexaPro, SARS-COV-2 Wuhan 1 RBD, SARS-COV-2 Beta RBD, SARS-COV-2 Delta, HIV-1 envelope. In (B) bars show binding to SARS-COV-2 kappa RBD SARS-COV-2 Wuhan 1 RBD, and Alphacoronavirus HuPn-2018 RBD, HIV-1 envelope in order of appearance. HuPn-2018 RBD was used to assess antibody reactivity with a new alphacoronavirus purported to infect humans in Malaysia. S_Hexapro is a SARS-COV-2 stabilized spike ectodomain. In both (A) and (B) HIV-1 envelope was used as a negative control.

[0222] FIGS. 87A-B show summary of immunogenetics, Vh and VI names and mutation frequency of select antibodies including DH1221-1226, DH1047, DH1073, DH1235 and DH1236. Sequences are shown in FIGS. 20-23, and FIG. 46.

### DETAILED DESCRIPTION

[0223] The present invention relates to antibodies and antigen binding fragments thereof, including recombinant and/or derivative forms that bind to coronavirus spike protein. In some embodiments, the antibodies or fragments bind specifically to epitopes on spike protein. In non-limiting embodiments, the antibodies are RBD binding antibodies. In some non-limiting embodiments the RBD binding antibodies are ACE-2 blocking neutralizing antibodies. In some non-limiting embodiments the RBD binding antibodies are non-ACE-2 blocking neutralizing antibodies. In some non-limiting embodiments the RBD binding antibodies are SARS-COV-2 neutralizing antibodies. In some non-limiting embodiments the RBD binding antibodies are cross reactive with SARS-CoV-1. In other non-limiting embodiments, the antibodies are NTD binding antibodies. In some non-limiting embodiments, the NTD antibodies are neutralizing antibodies. In some non-limiting embodiments, the NTD antibodies are ADE

### Recombinant Antibodies

[0224] Recombinant antibodies of the invention include antibodies derived from rearranged VDJ variable heavy chain (VH) and/or rearranged VJ variable light chain (VL) sequences from individual or clonal cells that express an antibody that specifically binds to coronavirus spike protein, and optionally are neutralizing. Antibodies are described in the accompanying examples, figures, and tables, and the invention includes antibodies comprising CDR sequences contained with the VH and VL amino acid sequences described herein. In certain embodiments, the invention provides monoclonal antibodies. In certain embodiments the monoclonal antibodies are produced by a clone of B-lymphocytes. In certain embodiments the monoclonal antibody is recombinant and is produced by a host cell into which an expression vector(s) encoding the antibody, or fragment thereof, has been transfected.

[0225] Methods for obtaining rearranged heavy and light chain sequences are well known in the art and often involve amplification-based-cloning and sequencing. Standard techniques of molecular biology may be used to prepare DNA sequences encoding the antibodies or antibody fragments of the present invention. DNA sequences can be synthesized completely or in part using oligonucleotide synthesis techniques. Site-directed mutagenesis and polymerase chain reaction (PCR) techniques may be used as appropriate.

[0226] The invention encompasses antibodies which are 99%, 98%, 97%, 96%, 95%, 94%, 93%, 92%, 91%, 90%, 89%, 88%, 87%, 86%, 85%, 84%, 83%, 82%, 81%, 80%, 75% identical to the VH and/or VL variable domain amino acid sequences of the antibodies described herein in the Figures or Tables 3-6, 10 or 11. Further, the invention encompasses variants having one or mutations (99% et seq, per herein) as compared to the sequences of the antibodies of the Figures or Tables 3-6, 10 or 11 with one or more of the additional requirements: (1) the variant maintains antigen binding specificity to the spike protein, and in some embodiments, maintains the ability to specifically bind an epitope that includes RBD, NTD, or S2, (2) the variant does not have a decrease in binding affinity or avidity that is more than 10-fold, 5-fold, 2-fold, or 1-fold than the corresponding antibody of the Figures or Tables 3-6, 10 or 11, (3) the variant has a binding affinity or avidity that is an improvement of more than 100-fold, 10-fold, 5-fold, 2-fold, or 1-fold more than the corresponding antibody of the Figures or Table 3-6, (4) the variant does not have a decrease in promoting neutralization that is more than 10-fold, 5-fold, 2-fold, or 1-fold as compared to the corresponding antibody of the Figures or Tables 3-6, 10 or 11, (5) the variant has an increase in neutralization that is 10-fold, 5-fold, 2-fold, or 1-fold more as compared to the corresponding antibody of the Figures or Tables, and (6) as compared to the antibodies listed in the Figures or Tables 3-6, 10 or 11, the variant has a V region with shared mutations compared to the germline, identical VDJ or VJ gene family usage, identical or the same or similar HCDR3 length, and the same VL and JLgene family usage. For example, one or more of these six requirements are applicable to any antibody, including fragments (see herein, Fab, Fv, et al.) or portions (VH, VL, one or more CDRs from a VH/VL pair) thereof, derived from the antibodies listed in Tables 3-6, 10 or 11 or the Figures. Various figure provide non-limiting embodiments of nucleic acids and plasmids for expression of mRNA encoded antibodies.

[0227] With respect to the antibodies listed in Tables 3-6, 10 or 11, their corresponding sequences are provided in at least FIGS. 20 and 22, where VH and VL portions are indicated. CDR regions are determined by any suitable method, e.g. but not limited by IMGT (www.imgt.org/IMGT_vquest). The boundaries of these CDR regions can be modified or substituted according to other CDR conventions as known in the art and as described herein.

[0228] Binding specificity can be determined by any suitable assay in the art, for example but not limited competition binding assays, epitope mapping, structural studies of antibodies, or fragments thereof, bound to target envelopes, etc.

[0229] Affinity can be measured, for example, by surface plasmon resonance. It is well-known in the art how to conduct SPR for measuring antibody affinity to an antigen. SPR affinity measurements can provide the affinity constant K_{D} of an antibody, which is based on the association rate constant kₒₙ divided by the disassociation rate constant k_{off}. Thus, in certain embodiments, comparing affinity between a variant and an antibody of the invention (e.g. Tables 3-6, 10 or 11) is based on K_{D}. In other embodiments, the comparison is based only on k_{off}. When comparing affinity between antibodies, the antibodies can have the same valency, i.e., Fab vs. Fab, scFv vs, scFv, IgG v. IgG, IgM v. IgM, etc. Thus, when the comparison is between antibodies that are not monovalent, then affinity is a measure of functional affinity. In the art, functional affinity covers the binding strength of a bi- or polyvalent antibody to antigens that present more than one copy of an epitope, because they are multimeric or conjugated in multiple copies to a solid phase, thus allowing cross-linking by the antibody. It is known in the art that a monovalent antibody fragment (e.g., Fab) provides a measure of intrinsic affinity irrespective of the density of antigens (SPR often immobilizes antigen on a solid substrate and the antibody is flowed over the substrate thereby allowing kinetic measurements of antibody association and disassociation rates).

[0230] Avidity can also be measured by SPR. Avidity can be quantitatively expressed, for example, by the ratio of K_{D} for a Fab over the multivalent form, e.g., IgG, IgM . . .

[0231] Potency can be measured, for example, by a virus inhibition pseudovirus assay or authentic virus Plaque Reduction Neutralization Test).

[0232] In certain embodiments, the invention provides antibodies with CDR amino acid sequences that are 99%, 98%, 97%, 96%, 95%, 94%, 93%, 92%, 91%, 90%, 89%, 88%, 87%, 86%, 85%, 84%, 83%, 82%, 81%, 80% identical to the CDR1, 2, and/or 3 of VH (also referred to as CDRH1, CDRH2, and CDRH3) and/or CDR1, 2, and/or 3 of VL (also referred to as CDRL1, CDRL2, and CDRL3) amino acid sequences of the antibodies of Tables 3-6, 10 or 11.

[0233] In certain embodiments, the invention provides antibodies with CDR amino acid sequences that are 99%, 98%, 97%, 96%, 95%, 94%, 93%, 92%, 91%, 90%, 89%, 88%, 87%, 86%, 85%, 84%, 83%, 82%, 81%, 80% identical to CDRs to an antibody of Table 3-6, 10 or 11, where each CDR can have a different percent identity. For example, the antibody has at least 99%, 98%, 97%, 96%, or 95% identity for all CDRs as compared to the CDRs of an antibody listed in Table 3-6 except HCDR3 and LCDR3, which can allow for a lower percent identity, for example, 99% to 80%, 99% to 85%, 99% to 90%, or 99% to 95%.

[0234] In certain embodiments, the invention provides antibodies which can tolerate a larger percent variation in the sequences outside of the VH and/VL sequences of the antibodies. In certain embodiments, the invention provides antibodies which are 99%, 98%, 97%, 96%, 95%, 94%, 93%, 92%, 91%, 90%, 89%, 88%, 87%, 86%, 85%, 84%, 83%, 82%, 81%, 80%, 79%, 78%, 77%, 76%, 75%, 74%, 73%, 72%, 71%, 70%, 69%, 68%, 67%, 66%, 65% identical, wherein the identity is outside of the VH or VL regions, or the CDRs of the VH or VL chains of the antibodies described herein.

[0235] In some aspects, the antibody or antigen binding fragment thereof, comprises a heavy chain comprising at least one CDRH1, at least one CDRH2 and at least one CDRH3 and a light chain comprising at least one CDRL1, at least one CDRL2 and at least one CDRL3, wherein at least one CDR, comprises, consists essentially of or consists of an amino acid sequence according to any of the sequences of the antibodies described herein, or a functional sequence variant thereof having at least 70%, at least 75%, at least 80%, at least 85%, at least 88%, at least 90%, at least 92%, at least 95%, at least 96%, at least 97%, at least 98% or at least 99% sequence identity. In certain embodiments, the functional variation is 80%, 81%, 82%, 83%, 84%, 85%, 86%, 87%, 88%, 89%, 90%, 91%, 92%, 93%, 94%, 95%, 96%, 97%, 98% or 99% identity. As stated herein, the person of ordinary skill in the art can select from one or more CDR conventions to identify the boundaries of the CDR regions.

[0236] In some aspects, the antibody or antigen binding fragment thereof, comprises, consists essentially of or consists of a VH amino acid sequence or a VL amino acid sequence in FIG. 15 or a functional sequence variant thereof having at least 70%, at least 75%, at least 80%, at least 85%, at least 88%, at least 90%, at least 92%, at least 95%, at least 96%, at least 97%, at least 98% or at least 99% sequence identity. In certain embodiments the functional variation is 80%, 81%, 82%, 83%, 84%, 85%, 86%, 87%, 88%, 89%, 90%, 91%, 92%, 93%, 94%, 95%, 96%, 97%, 98% or 99% identity.

[0237] In some aspects, the antibody or antigen-binding fragment thereof, comprises, consists essentially of or consists of a VH amino acid sequence and/or a VL amino acid sequence according to FIG. 20-25, 46.

[0238] Furthermore, the invention provides antibodies that are affinity matured in vitro. The affinity of an antibody to its antigen target can be modulated by identifying mutations introduced into the variable region or into targeted sub-regions. For example, it is known in the art that one can sequentially introduce mutations through each of the CDRs, optimizing one at a time, or to focus on CDRH3 and CDRL3, or CDRH3 alone, because it often forms the majority of antigen contacts. Alternatively, it is known in the art how to simultaneously mutagenize all six CDRs by generating large-scale, high-throughput expression and screening assays, such as by antibody phage display. Antibody-antigen complex structural information can also be used to focus affinity maturation to a small number of residues in the antibody binding site.

[0239] Various algorithms for sequence alignment are known in the art. For example, the NCBI Basic Local Alignment Search Tool (BLAST) (Altschul et al., J. Mol. Biol. 215:403, 1990) is available from several sources, including the National Center for Biotechnology Information (NCBI, Bethesda, Md.) and on the internet, for use in connection with the sequence analysis programs blastp, blastn, blastx, tblastn and tblastx. A description of how to determine sequence identity using this program is available on the NCBI website on the internet.

[0240] The similarity between amino acid sequences is expressed in terms of the similarity between the sequences, otherwise referred to as sequence identity. Sequence identity is frequently measured in terms of percentage identity (or similarity or homology); the higher the percentage, the more similar the two sequences are. Homologs or variants of a polypeptide will possess a relatively high degree of sequence identity when aligned using standard methods.

### CDRs and Frameworks

[0241] In some embodiments, the CDRs of the antibodies and fragments of the invention are defined according to the IMGT scheme. IMGT-defined CDR regions have been highlighted/underlined in the nucleotide and amino acid sequences for each of the VH and VL variable regions of the antibodies of Table 3-6, 10 or 11. (See FIGS. 20, 22.) IMGT sequence analysis tools will identify CDR and framework regions in the nucleotide sequence and translated amino acid sequence. See www.imgt.org/IMGT_vquest/analysis

[0242] In some embodiments, CDR and framework regions can be identified based on other classical variable region numbering and definition schemes or conventions, including the Kabat, Chothia, Martin, and Aho schemes. The ANARCI (Antigen receptor Numbering And Receptor Classification; see http: opig.stats.ox.ac.uk webapps newsabdab sabpred anarci) online tool allows one to input amino acid sequences and to select an output with the IMGT, Kabat, Chothia, Martin, or AHo numbering scheme. With these numbering schemes, CDR and framework regions within the amino acid sequence can be identified. The person of ordinary skill is able to ascertain CDR and framework boundaries using one or more of several publicly available tools and guides.

[0243] Different methods of identifying CDRs are well known and described in the art (e.g. Kabat, Chothia, IMGT). Delineating CDRs by any one of these methods will result in CDRs with specific boundaries within a VH or VL sequence as listed herein. CDRs identified by any one of the methods are specific and well defined. See, for example, Martin, A. C., R, “Chapter3: Protein Sequence and Structure Analysis of Antibody Variable Domains,” Antibody Engineering, vol. 2 (2nd ed.), Springer-Verlag, Berlin Heidelberg pp. 33-51 (2010) (describing inter alia Kabat, Chothia, IMGT); and Munshaw, S, and Kepler, T. B., “SoDA2: a Hidden Markov Model approach for identification of immunoglobulin rearrangements,” Bioinformatics, vol. 26, No. 7, pp. 867-872 (February 2010) (describing SoDA2). Any of these methods for identifying CDRs may be used with the technology described herein.

[0244] For example, provided herein is a general, not limiting guide, for the CDR regions as based on different numbering schemes (see http: www.bioinf.org.uk abs info.html #cdrid). In the Table, any of the numbering schemes can be used for these CDR definitions, except the Contact CDR definition uses the Chothia or Martin (Enhanced Chothia) numbering.

TABLE 1
General Guide of Selected CDR Definitions

| | Kabat CDR | AbM CDR | Chothia CDR | Contact CDR | IMGT CDR |
|---|---|---|---|---|---|
| CDR Loop | Definition | Definition | Definition | Definition | Definition |
| CDRL1 | L24-L34 | L24-L34 | L24-L34 | L30-L36 | L27-L32 |
| CDRL2 | L50-L56 | L50-L56 | L50-L56 | L46-L55 | L50-L51 |
| CDRL3 | L89-L97 | L89-L97 | L89-L97 | L89-L96 | L89-L97 |
| CDRH1 | H31-H35B | H26-H35B | H26- | H30-H35B | H26-H35B |
| (Kabat | | | H32 . . . H34 | | |
| numbering) | | | | | |
| CDRH1 | H31-H35 | H26-H35 | H26-H32 | H30-H35 | H26-H33 |
| (Chothia | | | | | |
| numbering) | | | | | |
| CDRH2 | H50-H65 | H50-H58 | H52-H56 | H47-H58 | H51-H56 |
| CDRH3 | H95-H102 | H95-H102 | H95-H102 | H93-H101 | H93-H102 |

[0245] In the table herein, for CDRH1 Kabat numbering using the Chothia CDR definition, the boundary is H26 to H32 or H34 because the Kabat numbering convention varies between H32 and H34 depending on the length of the loop. This is because the Kabat numbering scheme places insertions at H35A and H35B. If neither H35A nor H35B is present, CDRH2 ends at H32. If only H35A is present, the loop ends at H33. If both H35A and H35B are present, the loop ends at H34.

[0246] Alternatively or in combination, one can examine amino acid sequences and identify CDR and framework regions according to the following alternative general guideline of Table AB herein, which is non-limiting.

TABLE 2
General Guide for Demarcating CDR Boundaries

| CDR | |
|---|---|
| Region | Guidelines |
| LCDR1 | Start: approx. residue 24 |
| | Residue before: always a Cys |
| | Residue after: always a Trp. Such as Trp-Tyr-Gln, but also, |
| | Trp-Leu-Gln, Trp-Phe-Gln, Trp-Tyr-Leu |
| | Length: 10 to 17 residues |
| LCDR2 | Start: always 16 residues after the end of L1. Residues before |
| | Ile-Tyr, but also, Val-Tyr, Ile-Lys, Ile-Phe |
| | Length: always 7 residues (except NEW (7FAB) which has a |
| | deletion in this region) |
| LCDR3 | Start: always 33 residues after end of L2 (except NEW (7FAB) |
| | which has the deletion at the end of CDR-L2). Residue before |
| | always Cys. Residues after always Phe-Gly-XXX-Gly |
| | Length |
| | 7 to 11 residues |
| HCDR1 | Start |
| | Approx. residue 26 (always 4 after a Cys) [Chothia/AbM |
| | definition]; |
| | Kabat definition starts 5 residues later |
| | Residues before |
| | always Cys-XXX-XXX-XXX |
| | Residues after |
| | always a Trp. Such as Trp-Val, but also, Trp-Ile, Trp-Ala |
| | Length |
| | 10 to 12 residues [AbM definition]; |
| | Chothia definition excludes the last 4 residues |
| HCDR2 | Start |
| | always 15 residues after the end of Kabat/AbM definition) of |
| | CDR-H1 |
| | Residues before |
| | such as Leu-Glu-Trp-Ile-Gly, but a number of variations |
| | Residues after |
| | Lys/Arg-Leu/Ile/Val/Phe/Thr/Ala-Thr/Ser/Ile/Ala |
| | Length |
| | Kabat definition 16 to 19 residues; |
| | AbM (and recent Chothia) definition ends 7 residues earlier |
| HCDR3 | Start |
| | always 33 residues after end of CDR-H2 (always 2 after a Cys) |
| | Residues before |
| | always Cys-XXX-XXX (such as Cys-Ala-Arg) |
| | Residues after |
| | always Trp-Gly-XXX-Gly |
| | Length |
| | 3 to 25(!) residues |

[0247] In Figures showing sequences of the inventive antibodies, CDR boundaries can be defined according to any method, e.g. the IMGT scheme. Because framework (FR) regions constitute all of the variable domain sequence outside of the CDRs, once CDR boundaries are identified, framework regions are necessarily identified. The convention within the art is to label the framework regions as FR1 (sequence before CDR1), FR2 (sequence between CDR1 and CDR2), FR3 (sequence between CDR2 and CDR3), and FR4 (sequence after CDR3).

[0248] CDR and framework regions can also be demarcated using other numbering schemes and CDR definitions. The ABnum tool numbers the amino acid sequences of variable domains according to a large and regularly updated database called Abysis, which takes into account insertions of variable lengths and integrates sequences from Kabat, IMGT, and the PDB databases. The Honneger scheme is based on structural alignments of the 3D structures of immunoglobulin variable regions and allows one to define structurally conserved Ca positions and deduction of appropriate framework regions and CDR lengths (Honegger and Plückthun, J. Mol. Biol., 2001, 309:657-70). Similarly, Ofran et al, used a multiple structural alignment approach to identify the antigen binding residues of the variable regions called “Antigen Binding Regions (ABRs)” (Ofran et al., J. Imunol., 2008, 181:6230-5). ABRs can be identified using the Paratome online tool that identifies ABR by comparing the antibody sequence with a set of antibody-antigen structural complexes (Kunik et al., Nucleic Acids Res., 2012, 40:521-4). Another alternative tool is the proABC software, which estimates the probabilities for each residue to form an interaction with the antigen (Olimpieri et al., Bioinformatics, 2013, 29:2285-91).

[0249] In some embodiments, the CDRs of the antibodies of the invention are defined by the scheme or tool that provides the broadest or longest CDR sequence. In some embodiments, the CDRs are defined by a combination of schemes or tools that provides the broadest/longest CDRs. For example, from the Table of CDR Definitions herein, CDRL1 will be L24-L36, CDRL2 will be L46-L56, CDR3 will be L89-L97, CDRH1 will be H26-H35/H35B, CDRH2 will be H47-H65, and CDRH3 will be H93-H102. In some embodiments, the CDRs are defined by the Anticalign software, which automatically identifies all hypervariable and framework regions in experimentally elucidated antibody sequences from an algorithm based on rules from the Kabat and Chothia conventions (Jarasch et al., Proteins Struct. Funct. Bioinforma, 2017, 85:65-71). In some embodiments, the CDRs are defined by a combination of the Kabat, IMGT, and Chothia CDR definitions. In some embodiments, the CDRs are defined by the Martin scheme in combination with the Kabat and IMGT schemes. In some embodiments, the CDRs are defined by a combination of the Martin and Honneger schemes. In some embodiments, the CDRs comprise the ABR residues identified by the Paratome tool.

[0250] The complete human immunoglobulin germline gene loci and alleles are available in the Immunogenetics Database (IMGT). Skilled artisan can readily determine the V, D, and/or J heavy and/or light sequences of various embodiments of antibodies of the invention of fragments thereof.

### Fragments and Other Engineered Antibody Forms

[0251] In certain embodiments the invention provides antibody fragments, which have the binding specificity and/or properties of the inventive antibodies. Recombinant fragments of the antibodies can be obtained by cloning and expression of part of the sequences of the heavy or light chains.

[0252] Antibody “fragments” include Fab, Fab′, F(ab′)2, F (ab) c, diabodies, Dabs, nanobodies, and Fv fragments. Also included are heavy or light chain monomers and dimers, single domain heavy chain antibodies, single domain light chain antibodies, (a single domain antibody, sdAb, is also referred to in the art as a nanobody) as well as single chain antibodies, e.g., single chain Fv in which the heavy and light chain variable domains are joined by a peptide linker. (See, e.g., Bird et al., Science 242:423-426, 1988; Huston et al., Proc. Natl. Acad. Sci. USA 85:5879-5883, 1988; McCafferty et al., Nature 348:552-554, 1990). Optionally, a cleavage site can be included in a linker, such as a furin cleavage site.

[0253] A recombinant antibody can also comprise a heavy chain variable domain from one antibody and a light chain variable domain from a different antibody. Further, the invention encompasses chimeric antigen receptors (CARs; chimeric T cell receptors) engineered from the variable domains of antibodies. (Chow et al, Adv. Exp. Biol. Med., 2012, 746:121-41). The Chimeric Antigen Receptor (CAR) consists of an antibody-derived targeting domain (including fragments such as scFv or Fab) fused with T-cell signaling domains that, when expressed by a T-cell, endows the T-cell with antigen specificity determined by the targeting domain of the CAR.

### Fc Domains

[0254] Whether full-length, or fragments engineered to have a Fc domain, (or particular constant domain portions thereof), the antibodies of the invention can be of any isotype or have any Fc (or portion thereof) of any isotype. It is well-known in the art how to engineer Fc domains or portions together with antibody fragments.

[0255] In certain embodiments, the antibodies of the invention can be used as IgG1, IgG2, IgG3, IgG4, whole IgG1 or IgG3s, whole monomeric IgAs, dimeric IgAs, secretory IgAs, IgMs as monomeric, pentameric, hexameric, or other polymer forms of IgM. The class of an antibody comprising the VH and VL chains described herein can be specifically switched to a different class of antibody by methods known in the art.

[0256] In some embodiments, the nucleic acid encoding the VH and VL can encode an Fc domain (immunoadhesin). The Fc domain can be an IgA, IgM or IgG Fc domain. The Fc domain can be an optimized Fc domain, as described in U.S. Published patent application No. 20100093979, incorporated herein by reference. In one example, the immunoadhesin is an IgG1 Fc. In one example, the immunoadhesin is an IgG3 Fc.

[0257] In one embodiment, the IgG constant region comprises the LS mutation. Embodiments also comprise additional variants of the Fc portion of the antibody. See Maeda et al. MAbs. 2017 July; 9 (5): 844-853. Published online 2017 Apr. 7, PMID: 28387635; see also Booth et al. MAbs. 2018 October; 10 (7): 1098-1110. Published online 2018 Jul. 26, doi: 10.1080/19420862.2018.1490119.

[0258] In certain embodiments the antibodies comprise amino acid alterations, or combinations thereof, for example in the Fc region outside of epitope binding, which alterations can improve their properties. Various Fc modifications are known in the art.

[0259] Embodiments comprise antibodies comprising mutations that affect neonatal Fc receptor (FcRn) binding, antibody half-life, and localization and persistence of antibodies at mucosal sites. See e.g. Ko S Y et al., Nature 514:642-45, 2014, at FIG. 1a and citations therein; Kuo, T. and Averson, V., mAbs 3 (5): 422-430, 2011, at Table 1, US Pub 20110081347 (an aspartic acid at Kabat residue 288 and/or a lysine at Kabat residue 435), US Pub 20150152183 for various Fc region mutation, incorporated by reference in their entirety.

[0260] In certain embodiments, the antibodies comprise AAAA substitution in and around the Fc region of the antibody that has been reported to enhance ADCC via NK cells (AAA mutations) containing the Fc region aa of S298A as well as E333A and K334A (Shields R I et al JBC, 276:6591-6604, 2001) and the 4th A (N434A) is to enhance FcR neonatal mediated transport of the IgG to mucosal sites (Shields R I et al, ibid).

[0261] Other antibody mutations have been reported to improve antibody half-life or function or both and can be incorporated in sequences of the antibodies. These include the DLE set of mutations (Romain G, et al. Blood 124:3241, 2014), the LS mutations M428L/N434S, alone or in a combination with other Fc region mutations, (Ko S Y et al. Nature 514:642-45, 2014, at FIG. 1a and citations therein; Zlevsky et al., Nature Biotechnology, 28 (2): 157-159, 2010; US Pub 20150152183); the YTE Fc mutations (Robbie G et al Antimicrobial Agents and Chemotherapy 12:6147-53, 2013) as well as other engineered mutations to the antibody such as QL mutations, IHH mutations (Ko S Y et al. Nature 514:642-45, 2014, at FIG. 1a and relevant citations; See also Rudicell R et al. J. Virol 88:12669-82, 201).

[0262] In some embodiments, modifications, such as but not limited to antibody fucosylation, may affect interaction with Fc receptors (See e.g. Moldt, et al. JVI 86 (11): 66189-6196, 2012). In some embodiments, the antibodies can comprise modifications, for example but not limited to glycosylation, which reduce or eliminate polyreactivity of an antibody. See e.g. Chuang, et al. Protein Science 24:1019-1030, 2015.

[0263] In some embodiments the antibodies can comprise modifications in the Fc domain such that the Fc domain exhibits, as compared to an unmodified Fc domain enhanced antibody dependent cell mediated cytotoxicity (ADCC); increased binding to Fc.gamma.RIIA or to Fc.gamma.RIIIA; decreased binding to Fc.gamma.RIIB; or increased binding to Fc.gamma.RIIB. See e.g. US Pub 20140328836.

### Multivalent and Multispecific Antibodies

[0264] In certain embodiments the invention provides a multivalent and multispecific antibody. A multivalent antibody has at least two antigen-binding sites, i.e., at least two heavy/light chain pairs, or fragments thereof. When the heavy/light pairs of a multivalent antibody bind to different epitopes, whether on the same antigen or on different antigens, the antibody is considered to be multispecific. Antibody fragments may impart monovalent or multivalent interactions and be contained in a variety of structures as described herein. For instance, monovalent scFv molecules may be synthesized to create a bivalent diabody, a trivalent “triabody” or a tetravalent “tetrabody.” The scFv molecules may include a domain of the Fc region resulting in bivalent minibodies. In addition, the sequences of the invention may be a component of multispecific molecules in which the sequences of the invention target the epitopes of the invention and other regions of the molecule bind to other targets. Exemplary molecules include, but are not limited to, bispecific Fab2, trispecific Fab3, bispecific scFv, and diabodies (Holliger and Hudson, 2005, Nature Biotechnology 9:1126-1136).

[0265] In some embodiments, multivalent but not multispecific antibodies are provided, where the multivalent antibody comprises multiple identical VH/VL pairs, or the CDRs from the VH and a VL pairs. This type of multispecific antibody will serve to improve the avidity of an antibody. For example, a tetramer can comprise four identical scFvs where the scFv is based on the VH/VL pair from an antibody of Table 3-6, 10 or 11.

[0266] In some embodiments, multivalent but not multispecific antibodies comprise multiple VH/VL pairs (or the CDRs from the pairs) where each pair binds to an overlapping epitope. In some embodiments, multivalent but not multispecific antibodies comprise multiple VH/VL pairs (or the CDRs from the pairs) where each pair binds to an non-overlapping epitope. Determining overlapping epitopes can be conducted, for example, by structural analysis of the antibodies and competitive binding assays as known in the art.

[0267] In some embodiments, multispecific antibodies comprise multiple VH/VL pairs (or the CDRs from the pairs) where each pair binds to a distinct epitope (not overlapping) spike protein.

[0268] In some embodiments, multispecific antibodies or fragments of the invention comprise at least a VH and a VL pair from Tables 3-6, 10 or 11, or the CDRs from the VH and a VL pair, in order to provide the multispecific antibody with binding specificity to the spike protein. The multispecific antibody can have one or more additional binding specificities by further comprising antibody binding site fragments from antibodies that bind to different antigens.

[0269] In certain embodiments the invention provides a bispecific antibody. A bispecific or bifunctional/dual targeting antibody is an artificial hybrid antibody having two different heavy/light chain pairs and two different binding sites (see, e.g., Romain Rouet & Daniel Christ “Bispecific antibodies with native chain structure” Nature Biotechnology 32, 136-137 (2014); Garber “Bispecific antibodies rise again” Nature Reviews Drug Discovery 13, 799-801 (2014), FIG. 1a; Byrne et al. “A tale of two specificities: bispecific antibodies for therapeutic and diagnostic applications” Trends in Biotechnology, Volume 31, Issue 11, November 2013, Pages 621-632 Songsivilai and Lachmann, Clin. Exp. Immunol., 79:315-321 (1990); Kostelny et al., J. Immunol. 148:1547-53 (1992) (and references therein)). In certain embodiments the bispecific antibody is a whole antibody of any isotype. In other embodiments it is a bispecific fragment, for example but not limited to F (ab) 2 fragment. In some embodiments, the bispecific antibodies do not include Fc portion, which makes these diabodies relatively small in size and easy to penetrate tissues.

[0270] Non-limiting examples of multispecific antibodies also include: (1) a dual-variable-domain antibody (DVD-Ig), where each light chain and heavy chain contains two variable domains in tandem through a short peptide linkage (Wu et al., Generation and Characterization of a Dual Variable Domain Immunoglobulin (DVD-Ig.TM.) Molecule, In: Antibody Engineering, Springer Berlin Heidelberg (2010)); (2) a Tandab, which is a fusion of two single chain diabodies resulting in a tetravalent bispecific antibody that has two binding sites for each of the target antigens; (3) a flexibody, which is a combination of scFvs with a diabody resulting in a multivalent molecule; (4) a so called “dock and lock” molecule, based on the “dimerization and docking domain” in Protein Kinase A, which, when applied to Fabs, can yield a trivalent bispecific binding protein consisting of two identical Fab fragments linked to a different Fab fragment; (5) a so-called Scorpion molecule, comprising, e.g., two scFvs fused to both termini of a human Fc-region. Examples of platforms useful for preparing bispecific antibodies include but are not limited to BiTE (Micromet), DART (MacroGenics) (e.g., U.S. Pat. No. 8,795,667; US Publications 20090060910; 20100174053), Fcab and Mab2 (F-star), Fc-engineered IgG1 (Xencor) or DuoBody (based on Fab arm exchange, Genmab).

[0271] In certain embodiments, the multispecific antibodies can include an Fc region. For example, Fc bearing DARTs are heavier, and can bind neonatal Fc receptor, increasing their circulating half-life. See Garber “Bispecific antibodies rise again” Nature Reviews Drug Discovery 13, 799-801 (2014), FIG. 1a; See US Pub 20130295121, incorporated by reference in their entirety.

[0272] The invention also provides trispecific antibodies comprising binding specificities of the inventive antibodies. Non-limiting embodiments of trispecific format is described in Xu et al. Science 6 Oct. 2017, Vol. 358, Issue 6359, pp. 85-90; US Pub 20190054182; US Pub 20200054765.

[0273] In certain embodiments, the invention encompasses multispecific molecules comprising an Fc domain or portion thereof (e.g. a CH2 domain, or CH3 domain). The Fc domain or portion thereof may be derived from any immunoglobulin isotype or allotype including, but not limited to, IgA, IgD, IgG, IgE and IgM. In some embodiments, the Fc domain (or portion thereof) is derived from IgG. In some embodiments, the IgG isotype is IgG1, IgG2, IgG3 or IgG4 or an allotype thereof.

[0274] In some embodiments, the multispecific molecule comprises an Fc domain, which Fc domain comprises a CH2 domain and CH3 domain independently selected from any immunoglobulin isotype (i.e, an Fc domain comprising the CH2 domain derived from IgG and the CH3 domain derived from IgE, or the CH2 domain derived from IgG1 and the CH3 domain derived from IgG2, etc.). In some embodiments, the Fc domain may be engineered into a polypeptide chain comprising the multispecific molecule of the invention in any position relative to other domains or portions of the polypeptide chain (e.g., the Fc domain, or portion thereof, may be c-terminal to both the VL and VH domains of the polypeptide of the chain; may be n-terminal to both the VL and VH domains; or may be N-terminal to one domain and c-terminal to another (i.e., between two domains of the polypeptide chain)).

[0275] The present invention also encompasses molecules comprising a hinge domain. The hinge domain be derived from any immunoglobulin isotype or allotype including IgA, IgD, IgG, IgE and IgM. In some embodiments, the hinge domain is derived from IgG, wherein the IgG isotype is IgG1, IgG2, IgG3 or IgG4, or an allotype thereof. The hinge domain may be engineered into a polypeptide chain comprising the multispecific molecule together with an Fc domain such that the multispecific molecule comprises a hinge-Fc domain. In certain embodiments, the hinge and Fc domain are independently selected from any immunoglobulin isotype known in the art or exemplified herein. In other embodiments the hinge and Fc domain are separated by at least one other domain of the polypeptide chain, e.g., the VL domain. The hinge domain, or optionally the hinge-Fc domain, may be engineered into a polypeptide of the invention in any position relative to other domains or portions of the polypeptide chain. In certain embodiments, a polypeptide chain of the invention comprises a hinge domain, which hinge domain is at the C-terminus of the polypeptide chain, wherein the polypeptide chain does not comprise an Fc domain. In yet other embodiments, a polypeptide chain of the invention comprises a hinge-Fc domain, which hinge-Fc domain is at the C-terminus of the polypeptide chain. In further embodiments, a polypeptide chain of the invention comprises a hinge-Fc domain, which hinge-Fc domain is at the N-terminus of the polypeptide chain.

[0276] In some embodiments, the invention encompasses multimers of polypeptide chains, each of which polypeptide chains comprise a VH and a VL domain, comprising CDRs as described herein. In certain embodiments, the VL and VH domains comprising each polypeptide chain have the same specificity, and the multimer molecule is bivalent and monospecific. In other embodiments, the VL and VH domains comprising each polypeptide chain have differing specificity and the multimer is bivalent and bispecific. In some embodiments, the polypeptide chains in multimers further comprise an Fc domain. Dimerization of the Fc domains leads to formation of a diabody molecule that exhibits immunoglobulin-like functionality, i.e., Fc mediated function (e.g., Fc-Fc.gamma.R interaction, complement binding, etc.).

[0277] In yet other embodiments, diabody molecules of the invention encompass tetramers of polypeptide chains, each of which polypeptide chain comprises a VH and VL domain. In certain embodiments, two polypeptide chains of the tetramer further comprise an Fc domain. The tetramer is therefore comprised of two ‘heavier’ polypeptide chains, each comprising a VL, VH and Fc domain, and two ‘lighter’ polypeptide chains, comprising a VL and VH domain. Interaction of a heavier and lighter chain into a bivalent monomer coupled with dimerization of the monomers via the Fc domains of the heavier chains will lead to formation of a tetravalent immunoglobulin-like molecule. In certain aspects the monomers are the same, and the tetravalent diabody molecule is monospecific or bispecific. In other aspects the monomers are different, and the tetravalent molecule is bispecific or tetraspecific.

[0278] Formation of a tetraspecific diabody molecule as described supra requires the interaction of four differing polypeptide chains. Such interactions are difficult to achieve with efficiency within a single cell recombinant production system, due to the many variants of chain mispairings. One solution to increase the probability of mispairings, is to engineer “knobs-into-holes” type mutations into the polypeptide chain pairs. Such mutations favor heterodimerization over homodimerization. For example, with respect to Fc-Fc-interactions, an amino acid substitution (such as a substitution with an amino acid comprising a bulky side group forming a ‘knob’, e.g., tryptophan) can be introduced into the CH2 or CH3 domain such that steric interference will prevent interaction with a similarly mutated domain and will obligate the mutated domain to pair with a domain into which a complementary, or accommodating mutation has been engineered, i.e., ‘the hole’ (e.g., a substitution with glycine). Such sets of mutations can be engineered into any pair of polypeptides comprising the diabody molecule, and further, engineered into any portion of the polypeptides chains of the pair. Methods of protein engineering to favor heterodimerization over homodimerization are well known in the art, in particular with respect to the engineering of immunoglobulin-like molecules, and are encompassed herein (see e.g., Ridgway et al. (1996) “′Knobs-Into-Holes' Engineering Of Antibody CH3 Domains For Heavy Chain Heterodimerization,” Protein Engr. 9:617-621, Atwell et al. (1997) “Stable Heterodimers From Remodeling The Domain Interface Of A Homodimer Using A Phage Display Library,” J. Mol. Biol. 270:26-35, and Xie et al. (2005) “A New Format Of Bispecific Antibody: Highly Efficient Heterodimerization, Expression And Tumor Cell Lysis,” J. Immunol. Methods 296:95-101; each of which is hereby incorporated herein by reference in its entirety).

[0279] The invention also encompasses diabody molecules comprising variant Fc or variant hinge-Fc domains (or portion thereof), which variant Fc domain comprises at least one amino acid modification (e.g. substitution, insertion deletion) relative to a comparable wild-type Fc domain or hinge-Fc domain (or portion thereof). Molecules comprising variant Fc domains or hinge-Fc domains (or portion thereof) (e.g., antibodies) normally have altered phenotypes relative to molecules comprising wild-type Fc domains or hinge-Fc domains or portions thereof. The variant phenotype may be expressed as altered serum half-life, altered stability, altered susceptibility to cellular enzymes or altered effector function as assayed in an NK dependent or macrophage dependent assay. Fc domain variants identified as altering effector function are known in the art. For example International Application WO04/063351, U.S. Patent Application Publications 2005/0037000 and 2005/0064514.

[0280] The bispecific diabodies of the invention can simultaneously bind two separate and distinct epitopes. In certain embodiments the two separate epitopes are on different cells. In certain embodiments, the two separate epitopes are on two different inhibitory receptors on the same cell. In certain embodiments the epitopes are from the same antigen. In other embodiments, the epitopes are from different antigens. In some embodiments, at least one epitope binding site is specific for a determinant expressed on an immune effector cell (e.g. CD3, CD16, CD32, CD64, etc.) which are expressed on T lymphocytes, natural killer (NK) cells or other mononuclear cells. In one embodiment, the diabody molecule binds to the effector cell determinant and also activates the effector cell. In this regard, diabody molecules of the invention may exhibit Ig-like functionality independent of whether they further comprise an Fc domain (e.g., as assayed in any effector function assay known in the art or exemplified herein (e.g., ADCC assay).

[0281] In certain embodiments the bispecific antibodies engage cells for Antibody-Dependent Cell-mediated Cytotoxicity (ADCC). In certain embodiments the bispecific antibodies engage natural killer cells, neutrophil polymorphonuclear leukocytes, monocytes and macrophages. In certain embodiments the bispecific antibodies are T-cell engagers. In certain embodiments, the bispecific antibody comprises a coronavirus binding fragment and a CD3 binding fragment. Various CD3 antibodies are known in the art. See for example U.S. Pat. No. 8,784,821. In certain embodiments, the bispecific antibody comprises a coronavirus binding fragment and CD16 binding fragment.

[0282] In certain embodiments the invention provides antibodies with dual targeting specificity. In certain aspects the invention provides bi-specific molecules that can localize an immune effector cell to a coronavirus expressing cell, such as a host cell or a virally infected cell, so as facilitate the killing of this cell. In this regard, bispecific antibodies bind with one “arm” to a surface antigen on target cells, and with the second “arm” to an activating, invariant component of the T cell receptor (TCR) complex or to an activating, invariant component of a different stimulatory receptor such as NKG2C on NK cells or other immune effector cells. The simultaneous binding of such an antibody to both of its targets will force a temporary interaction between target cell and effector cell, causing, for example, activation of any cytotoxic T cell or NK cell and subsequent lysis of the target cell. Hence, the immune response is re-directed to the target cells and may be independent of classical MHC class I peptide antigen presentation by the target cell or the specificity of the T cell as will be relevant for normal MHC-restricted activation of CTLs. In this context it is crucial that CTLs are only activated when a target cell is presenting the bispecific antibody to them, i.e, the immunological synapse is mimicked. For example, embodiments include bispecific antibodies that do not require lymphocyte preconditioning or co-stimulation in order to elicit efficient lysis of target cells.

[0283] Several bispecific antibody formats have been developed and their suitability for T cell mediated immunotherapy investigated. Out of these, the so-called BiTE (bispecific T cell engager) molecules have been very well characterized and already shown some promise in the clinic (reviewed in Nagorsen and Bauerle, Exp Cell Res 317, 1255-1260 (2011)). BiTEs are tandem scFv molecules wherein two scFv molecules are fused by a flexible linker. Further bispecific formats being evaluated for T cell engagement include diabodies (Holliger et al., Prot Eng 9, 299-305 (1996)) and derivatives thereof, such as tandem diabodies (Kipriyanov et al., J Mol Biol 293, 41-66 (1999)). DART (dual affinity retargeting) molecules are based on the diabody format that separates cognate variable domains of heavy and light chains of the two antigen binding specificities on two separate polypeptide chains but feature a C-terminal disulfide bridge for additional stabilization (Moore et al., Blood 117, 4542-51 (2011)). Embodiments also comprise Fc-bearing DARTs. The so-called triomabs, which are whole hybrid mouse/rat IgG molecules and also currently being evaluated in clinical trials, represent a larger sized format (reviewed in Seimetz et al., Cancer Treat Rev 36, 458-467 (2010)).

[0284] Embodiments comprise bispecific molecules with enhanced pharmacokinetic properties. In some embodiments, such molecules can have increased serum half-life. In some embodiments, these are Fc-bearing DARTs (see supra).

[0285] In certain embodiments, such bispecific molecules comprise one portion which targets one portion of the spike protein and a second portion which binds a second target on the spike protein. In certain embodiments, the first portion comprises VH and VL sequences, or CDRs from the antibodies described herein. In certain embodiments, the second target can be, for example but not limited to an effector cell. In certain embodiments the second portion is a T-cell engager. In certain embodiments, the second portion comprises a sequence/paratope which targets CD3, CD16, or another suitable target. In certain embodiments, the second portion is an antigen-binding region derived from a CD3 antibody, optionally a known CD3 antibody. In certain embodiments, the anti-CD antibody induce T cell-mediated or NK-mediated killing. In certain embodiments, the bispecific antibodies are whole antibodies. In other embodiments, the dual targeting antibodies consist essentially of Fab fragments. In other embodiments, the dual targeting antibodies comprise a heavy chain constant region. In certain embodiments, the bispecific antibody does not comprise Fc region. In certain embodiments, the bispecific antibodies have improved effector function. In certain embodiments, the bispecific antibodies have improved cell killing activity. Various methods and platforms for design of bispecific antibodies are known in the art. See for example US Pub. 20140206846, US Pub. 20140170149, US Pub. 20090060910, US Pub 20130295121, US Pub. 20140099318, US Pub. 20140088295 which contents are herein incorporated by reference in their entirety.

### Binding and Neutralization Assays

[0286] In some embodiments, the antibodies of the invention are SARS COV-2 neutralizing antibodies. SARS-COV-2 neutralization can be determined by assays known in the art. Non-limiting examples of neutralization assays include PRNT assay, various pseudovirus based neutralization assays are known and described in the art.

[0287] Neutralization assays measure neutralizing properties of antibodies. Neutralization properties can correlate with protection from infection and/or therapeutic benefits post infection. In non-limiting examples, neutralization is measured by plaque reduction neutralization test (PRNT). Although PRNT (neutralization) and ELISA (binding) results correlate with each other, PRNT remains the gold-standard for determining neutralization properties.

[0288] In other embodiments, fluorescence-based assay that rapidly and reliably measures neutralization of a reporter SARS-COV-2 by antibodies provide a higher throughput neutralization assay.

[0289] In some embodiments, neutralization can be determined using a lentivirus-based pseudotyped virus with SARS-COV-2 S protein. With such a system, neutralization can be assessed with respect to the spike protein variants of different SARS COV-2 strains. Strain information and sequence can be obtained from the Global Initiative for Sharing All Influenza Data (GISAID) database and Nextstrain. Non-limiting methods for carrying out neutralization assays are described in the supplementary methods of Korber et al. 2020, Cell182, 812-827.

[0290] Nie et al, used the full length S gene from strain Wuhan-Hu-1 with the vesicular stomatitis virus (VSV) pseudovirus system. (Nie et al., Establishment and validation of a pseudovirus neutralization assay for SARS-COV-2, Emerging Microbes Infection, 2020, 9:680-686; citing Whitt, MA., Generation of VSV pseudotypes using recombinant DeltaG-VSV for studies on virus entry, identification of entry inhibitors, and immune responses to vaccines, J Virol Methods, 2010, 169 (2): 365-74.) Briefly, the SARS-COV-2 spike gene can be codon-optimized and cloned into a eukaryotic expression plasmid. 293T cells can be transfected by the plasmid and later infected with a VSV pseudotyped virus (G*DG-VSV), which substitutes the VSV-G gene with luciferase expression cassettes. The culture supernatants are then harvested and filtered 24 h postinfection. The SARS-COV-2 pseudovirus presents the SARS-COV-2 spike protein in the surface of the VSV particle as can be confirmed by Western blot with SARS-COV-2 convalescent patient sera. (Id.)

[0291] The SARS-COV-pseudovirus-based neutralization assay (PBNA) tests whether antibodies are able to neutralize SARS-COV-2 pseudovirus infection of susceptible cell-lines (e.g., Vero, Huh7, 293T, HepG2, CHO, MDCK; with Huh7 identified as the best cell substrate for the system), as indicated by inhibition curves of % reduction of RLU relative to antibody sample dilution. (Id.) The SARS-COV-2 pseudovirus can not be neutralized by VSV-G antibodies. In one embodiment, the pseudovirus neutralization assays can be performed using Huh-7 cell lines. Huh-7 are human hepatocellular carcinoma cells that express both ACE2 and TMPRSS2. Various concentrations of mAbs (e.g., 3-fold serial dilution using DMEM, 50 mL aliquots) are mixed with the same volume of SARS-COV-2 pseudovirus with a TCID₅₀ of 1.3×10⁴ in a 96 well-plate. The mixture is incubated for 1 h at 37° C., supplied with 5% CO₂. Negative control wells are supplied with 100 mL DMEM (1% (v/v) antibiotics, 25 nM HEPES, 10% (v/v) FBS). Positive control wells are supplied with 100 mL DMEM. Pre-mixed Huh-7 cells (100 mL, 2 3 105 in DMEM) are added to all wells, and the 96-well plates are incubated for 24 h at 37° C. supplied with 5% CO₂. After the incubation, 150 mL of supernatants are removed, and 100 mL D-luciferin reagent (Invitrogen) is added to each well and incubated for 2 mins. After the incubation, every well is mixed 10 times by pipetting, and 150 mL of the mixture is used to measure luciferase activity using a microplate spectrophotometer (Perkinelmer EnSight). The inhibition rate is calculated by comparing the OD value to the negative and positive control wells. IC50 and IC80 are determined by a four-parameter logistic regression using GraphPad Prism 8.0 (GraphPad Software Inc.).

[0292] In some embodiments, neutralization is determined using a SARS COV-2 S pseudotyped virus where the spike protein is the G614 variant. (Korber, B., et al., Tracking changes in SARS-CoV-2 Spike: evidence that D614G increases infectivity of the COVID-19 virus, Cell, Jul. 2, 2020, doi: https://doi.org/10.1016/j.cell.2020.06.043; describing the Spike D614G amino acid change is caused by an A-to-G nucleotide mutation at position 23,403 in the Wuhan reference strain.) The D614G change is almost always accompanied by three other mutations: a C-to-T mutation in the 5′ UTR (position 241relative to the Wuhan reference sequence), a silent C-to-T mutation at position 3,037; and a C-to-T mutation at position 14,408 that results in an amino acid change in RNA-dependent RNA polymerase (RdRp P323L). The haplotype comprising these 4 genetically linked mutations is now the globally dominant form. (Id.) In some embodiments, neutralization is determined using a SARS COV-2 S pseudotyped virus where the spike protein is from strain Wuhan-Hu-1. (GenBank: MN908947.) In some embodiments, a SARS COV-2 S pseudotyped virus uses the VSV pseudovirus or a murine leukemia virus (MLV) pseudotype system. In some embodiments, neutralization assays use authentic SARS-COV-2.

### Production of Antibodies

[0293] Antibodies, such as monoclonal antibodies, according to the invention can be made by any method known in the art.

[0294] In certain embodiments, plasma cells are cultured in limited numbers, or as single plasma cells in microwell culture plates. Antibodies can be isolated from the plasma cell cultures. VH and VL can be isolated from single cell sorted plasma cells. From the plasma cell, RNA can be extracted and PCR can be performed using methods known in the art. The VH and VL regions of the antibodies can be amplified by RT-PCR (reverse transcriptase PCR), sequenced and cloned into intermediate vectors for further engineering or into an expression vector that is then transfected into HEK293T cells or other host cells as described herein or known in the art. The cloning of nucleic acid in intermediate vectors, expression vectors, the transfection of host cells, the culture of the transfected host cells and the isolation of the produced antibody can be done using any methods known to one of skill in the art. Antibody isolation and purification techniques are known in the art, which can include filtration, centrifugation and various chromatographic methods such as HPLC or affinity chromatography. Techniques for purification of antibodies, e.g., monoclonal antibodies, including techniques for producing pharmaceutical-grade antibodies (and at a sufficiently high concentration or titer for therapeutic use), are well known in the art.

[0295] In some embodiments, the antibodies or fragments of the invention have an IgM Fc region or constant domains thereof. It is established that IgM can assume both pentameric and hexameric configurations, depending on the substitution of the J-chain with an additional Fab (2) monomer, which increases the number of Fabs on a single IgM from 10 to 12 (Hiramoto et al Sci. Adv. 2018; 4: eaau1199; Moh E S et al J Am Soc Mass Spectrom. 2016 July;27 (7): 1143-55). Methods for the recombinant production of polymeric IgM (both with and without J chain) have been described (Chromikova et al., Cytotechnology, 2015, 67:343-356; Gilmour et al. Transfusion Medicine, 2008. 18:167-174; Hennicke et al., PLOS ONE, 2020, 15 (3): e0229992). Stable or transient IgM producing cells lines can be generated as described in Chromikova et al., 2015 and Hennicke et al., 2020, where two different pIRES expression vectors are used, one to express the heavy chain and the other to express the light chain and the J-chain sequence. IgM antibodies can be purified according to standard methods in the art, including IgM specific resins for use in affinity chromatography (e.g., POROS Capture Select IgM Affinity Matrix by ThermoFisherScientific.) Transmission electron microscopy (TEM) can be used to confirm pentameric and hexameric forms of IgM.

[0296] In addition, besides expression constructs that encode antibody fragments or elements, protein fragments of antibodies can be obtained by methods that include digestion with enzymes, such as pepsin or papain, and/or by cleavage of disulfide bonds by chemical reduction.

[0297] Any suitable host cell/vector system may be used for expression of the DNA sequences encoding the antibody molecules of the present invention or fragments thereof. Bacterial, for example E, coli, and other microbial systems may be used, in part, for expression of antibody fragments such as Fab and F(ab′) 2 fragments, and especially Fv fragments and single chain antibody fragments, for example, single chain Fvs, eukaryotic, e.g., mammalian, host cell expression systems may be used for production of larger antibody molecules, including complete antibody molecules. Suitable mammalian host cells include, but are not limited to, CHO, HEK293T, PER.C6, NSO, myeloma or hybridoma cells. Mammalian cell lines suitable for expression of therapeutic antibodies are well known in the art.

[0298] The antibody molecule may comprise only a heavy or light chain polypeptide, in which case only a heavy chain or light chain polypeptide coding sequence needs to be used to transfect the host cells. For production of products comprising both heavy and light chains, the cell line may be transfected with two vectors, a first vector encoding a light chain polypeptide and a second vector encoding a heavy chain polypeptide. Alternatively, a single vector may be used, the vector including sequences encoding light chain and heavy chain polypeptides. Alternatively, antibodies according to the invention may be produced by (i) expressing a nucleic acid sequence according to the invention in a host cell, e.g. by use of a vector according to the present invention, and (ii) isolating the expressed antibody product. Additionally, the method may include (iii) purifying the isolated antibody. Transformed B cells and cultured plasma cells can be screened for those producing antibodies of a certain specificity or function.

[0299] The screening step may be carried out by any immunoassay, e.g., ELISA, by staining of tissues or cells (including transfected cells), by neutralization assay or by one of a number of other methods known in the art for identifying specificity or function. The assay can select on the basis of simple recognition of one or more antigens, or can select on the additional basis of a function e.g., to select neutralizing antibodies rather than just antigen-binding antibodies, to select antibodies that can change characteristics of targeted cells, such as their signaling cascades, their shape, their growth rate, their capability of influencing other cells, their response to the influence by other cells or by other reagents or by a change in conditions, their differentiation status, etc.

[0300] Individual transformed B cell clones may then be produced from the positive transformed B cell culture. The cloning step for separating individual clones from the mixture of positive cells may be carried out using limiting dilution, micromanipulation, single cell deposition by cell sorting or another method known in the art.

[0301] Nucleic acid from the cultured plasma cells can be isolated, cloned and expressed in HEK293T cells or other known host cells using methods known in the art.

[0302] B cell clones or transfected host-cells of the invention can be used in various ways e.g., as a source of monoclonal antibodies, as a source of nucleic acid (DNA or mRNA) encoding a monoclonal antibody of interest, for research, etc.

[0303] Expression from recombinant sources is common for pharmaceutical purposes than expression from B cells or hybridomas e.g., for reasons of stability, reproducibility, culture ease, etc.

[0304] Thus the invention also provides a method for preparing a recombinant cell, comprising the steps of: (i) obtaining one or more nucleic acids (e.g., heavy and/or light chain mRNAs) from the B cell clone or the cultured plasma cells that encodes the antibody of interest; (ii) inserting the nucleic acid into an expression vector and (iii) transfecting the vector into a host cell in order to permit expression of the antibody of interest in that host cell.

[0305] Similarly, the invention provides a method for preparing a recombinant cell, comprising the steps of: (i) sequencing nucleic acid(s) from the B cell clone or the cultured plasma cells that encodes the antibody of interest; and (ii) using the sequence information from step (i) to prepare nucleic acid(s) for insertion into a host cell in order to permit expression of the antibody of interest in that host cell. The nucleic acid may, but need not, be manipulated between steps (i) and (ii) to introduce restriction sites, to change codon usage, and/or to optimize transcription and/or translation regulatory sequences.

[0306] Furthermore, the invention also provides a method of preparing a transfected host cell, comprising the step of transfecting a host cell with one or more nucleic acids that encode an antibody of interest, wherein the nucleic acids are nucleic acids that were derived from a cell sorted B cell or a cultured plasma cell of the invention.

[0307] These recombinant cells of the invention can then be used for expression and culture purposes. They are useful for expression of antibodies for large-scale pharmaceutical production. They can also be used as the active ingredient of a pharmaceutical composition. Any suitable culture technique can be used, including but not limited to static culture, roller bottle culture, ascites fluid, hollow-fiber type bioreactor cartridge, modular minifermenter, stirred tank, microcarrier culture, ceramic core perfusion, etc.

[0308] Any suitable host cells can be used for transfection and production of the antibodies of the invention. The transfected host cell may be a eukaryotic cell, including yeast and animal cells, such as mammalian cells (e.g., CHO cells, NSO cells, human cells such as PER.C6 or HKB-11 cells, myeloma cells, or a human liver cell), as well as plant cells. In certain embodiments, expression hosts can glycosylate the antibody of the invention, such as with carbohydrate structures that are not themselves immunogenic in humans. In one embodiment, the transfected host cell may be able to grow in serum-free media. In a further embodiment, the transfected host cell may be able to grow in culture without the presence of animal-derived products. The transfected host cell may also be cultured to give a cell line.

[0309] In general, protein therapeutics are produced from mammalian cells. The most widely used host mammalian cells are Chinese hamster ovary (CHO) cells and mouse myeloma cells, including NSO and Sp2/0 cells. Two derivatives of the CHO cell line, CHO-K1 and CHO pro-3, gave rise to the two most commonly used cell lines in large scale production, DUKX-X11 and DG44. (Kim, J., et al., Appl. Microbiol. Biotechnol., 2012, 93:917-30.) Other mammalian cell lines for recombinant antibody expression include, but are not limited to, COS, HeLa, HEK293T, U2OS, A549, HT1080, CAD, P19, NIH 3T3, L929, N2a, HEK 293, MCF-7, Y79, SO-Rb50, HepG2, J558L, and BHK. If the aim is large-scale production, the most currently used cells for this application are CHO cells. Guidelines to cell engineering for mAbs production were also reported. (Costa et al., Eur J Pharm Biopharm, 2010, 74:127-38.) Using heterologous promoters, enhancers and amplifiable genetic markers, the yields of antibody and antibody fragments can be increased. Thus, in certain embodiments, the invention provides an antibody, or antibody fragment, that is recombinantly produced from a mammalian cell-line, including a CHO cell-line. In certain embodiments, the invention provides a composition comprising an antibody, or antibody fragment, wherein the antibody or antibody fragment was recombinantly produced in a mammalian cell-line, and wherein the antibody or antibody fragment is present in the composition at a concentration of at least 1, 10, 100, 1000 micrograms/mL, or at a concentration of at least 1, 2, 3, 4, 5, 6, 7, 8, 9, 10, 20, 50, or 100 milligrams/mL.

[0310] Furthermore, large-scale production of therapeutic-grade antibodies are much different than those for laboratory scale. There are extreme purity requirements for therapeutic-grade. Large-scale production of therapeutic-grade antibodies requires multiples steps, including product recovery for cell-culture harvest (removal of cells and cell debris), one or more chromatography steps for antibody purification, and formulation (often by tangential filtration). Because mammalian cell culture and purification steps can introduce antibody variants that are unique to the recombinant production process (i.e., antibody aggregates, N- and C-terminal variants, acidic variants, basic variants, different glycosylation profiles), there are recognized approaches in the art for analyzing and controlling these variants. (See, Fahrner, et al., Industrial purification of pharmaceutical antibodies: Development, operation, and validation of chromatography processes, Biotech. Gen. Eng. Rev., 2001, 18:301-327.) In certain embodiments of the invention, the antibody composition comprises less than 1, 2, 3, 4, 5, 10, 15, 20, 25, 30, 35, 50, or 100 nanograms of host cell protein (i.e., proteins from the cell-line used to recombinantly produce the antibody)). In other embodiments, the antibody composition comprises less than 1, 2, 3, 4, 5, 6, 7, 8, 9, 10, 15, 20, or 25 ng of protein A per milligram of antibody or antibody fragment (i.e., protein A is a standard approach for purifying antibodies from recombinant cell culture, but steps can be done to limit the amount of protein A in the composition, as it may be immunogenic). (See, e.g., U.S. Pat. No. 7,458,704, Reduced protein A leaching during protein A affinity chromatography; which is hereby incorporated-by-reference.)

[0311] In certain aspects the invention provides nucleic acids encoding the inventive antibodies. In non-limiting embodiments, the nucleic acids are mRNA, modified or unmodified, suitable for use any use, e.g. but not limited to use as pharmaceutical compositions. In certain embodiments, the nucleic acids are formulated in lipid, such as but not limited to LNPs.

### Pharmaceutical Compositions

[0312] The present invention also provides a pharmaceutical composition comprising one or more of: (i) the antibody, or the antibody fragment thereof, according to the present invention; (ii) the nucleic acid encoding the antibody, or antibody fragments according to the present invention; (iii) the vector comprising the nucleic acid according to the present invention; and/or (iv) the cell expressing the antibody according to the present invention or comprising the vector according to the present invention.

[0313] In certain aspects, the invention provides a pharmaceutical composition comprising the antibody, or the antigen binding fragment thereof, according to the present invention, the nucleic acid according to the present invention, the vector according to the present invention and/or the cell according to the present invention.

[0314] The pharmaceutical composition may also contain a pharmaceutically acceptable carrier, diluent and/or excipient. Although the carrier or excipient may facilitate administration, it can not itself induce the production of antibodies harmful to the individual receiving the composition. Nor can it be toxic. Suitable carriers may be large, slowly metabolized macromolecules such as proteins, polypeptides, liposomes, polysaccharides, polylactic acids, polyglycolic acids, polymeric amino acids, amino acid copolymers and inactive virus particles. In general, pharmaceutically acceptable carriers in a pharmaceutical composition according to the present invention may be active components or inactive components. In certain embodiments the pharmaceutically acceptable carrier in a pharmaceutical composition according to the present invention is not an active component in respect to coronavirus infection.

[0315] Pharmaceutically acceptable salts can be used, for example mineral acid salts, such as hydrochlorides, hydrobromides, phosphates and sulphates, or salts of organic acids, such as acetates, propionates, malonates and benzoates.

[0316] Pharmaceutically acceptable carriers in a pharmaceutical composition may additionally contain liquids such as water, saline, glycerol and ethanol. Additionally, auxiliary substances, such as wetting or emulsifying agents or pH buffering substances, may be present in such compositions. Such carriers enable the pharmaceutical compositions to be formulated as tablets, pills, capsules, liquids, gels, syrups, slurries and suspensions, for ingestion by the subject.

[0317] Pharmaceutical compositions of the invention may be prepared in various forms. For example, the compositions may be prepared as injectables, either as liquid solutions or suspensions. Solid forms suitable for solution in, or suspension in, liquid vehicles prior to injection can also be prepared (e.g., a lyophilized composition, similar to Synagis. TM, and Herceptin. TM., for reconstitution with sterile water containing a preservative). The composition may be prepared for topical administration e.g., as an ointment, cream or powder. The composition may be prepared for oral administration e.g., as a tablet or capsule, as a spray, or as a syrup (optionally flavored). The composition may be prepared for pulmonary administration e.g., as an inhaler, using a fine powder or a spray. The composition may be prepared as a suppository or pessary. The composition may be prepared for nasal, aural or ocular administration e.g., as drops. The composition may be in kit form, designed such that a combined composition is reconstituted just prior to administration to a subject. For example, a lyophilized antibody may be provided in kit form with sterile water or a sterile buffer.

[0318] A thorough discussion of pharmaceutically acceptable carriers is available in Gennaro (2000) Remington: The Science and Practice of Pharmacy, 20th edition, ISBN: 0683306472.

[0319] Pharmaceutical compositions of the invention have a pH between 5.5 and 8.5, in some embodiments this may be between 6 and 8, and in other embodiments about 7. The pH may be maintained by the use of a buffer. The composition may be sterile and/or pyrogen free. The composition may be isotonic with respect to humans. In one embodiment pharmaceutical compositions of the invention are supplied in hermetically-sealed containers.

[0320] Within the scope of the invention are compositions present in several forms of administration; the forms include, but are not limited to, those forms suitable for parenteral administration, e.g., by injection or infusion, for example by bolus injection or continuous infusion. Where the product is for injection or infusion, it may take the form of a suspension, solution or emulsion in an oily or aqueous vehicle and it may contain formulatory agents, such as suspending, preservative, stabilizing and/or dispersing agents. Alternatively, the antibody molecule may be in dry form, for reconstitution before use with an appropriate sterile liquid. A vehicle can be a material that is suitable for storing, transporting, and/or administering a compound, such as a pharmaceutically active compound, for example the antibodies according to the present invention. For example, the vehicle may be a physiologically acceptable liquid, which is suitable for storing, transporting, and/or administering a pharmaceutically active compound, for example the antibodies according to the present invention. Once formulated, the compositions of the invention can be administered directly to the subject. In one embodiment the compositions are adapted for administration to mammalian, e.g., human subjects.

[0321] The pharmaceutical compositions of this invention may be administered by any number of routes including, but not limited to, oral, intravenous, intramuscular, intra-arterial, intramedullary, intraperitoneal, intrathecal, intraventricular, transdermal, transcutaneous, topical, subcutaneous, intranasal, enteral, sublingual, intravaginal or rectal routes. Hyposprays or nebulizers may also be used to administer the pharmaceutical compositions of the invention. In certain embodiments, the pharmaceutical composition may be prepared for oral administration, e.g. as tablets, capsules and the like, for topical administration, or as injectable, e.g. as liquid solutions or suspensions. In certain embodiments, the pharmaceutical composition is an injectable. Embodiments also comprise solid forms suitable for solution in, or suspension in, liquid vehicles prior to injection, e.g. that the pharmaceutical composition is in lyophilized form.

[0322] For injection, e.g. intravenous, cutaneous or subcutaneous injection, or injection at the site of affliction, the active ingredient can be in the form of a parenterally acceptable aqueous solution which is pyrogen-free and has suitable pH, isotonicity and stability. Those of relevant skill in the art are well able to prepare suitable solutions using, for example, isotonic vehicles such as Sodium Chloride Injection, Ringer's Injection, Lactated Ringer's Injection. Preservatives, stabilizers, buffers, antioxidants and/or other additives may be included, as required. Whether it is a polypeptide, peptide, or nucleic acid molecule, other pharmaceutically useful compound according to the present invention that is to be given to an individual, administration is in a “prophylactically effective amount” or a “therapeutically effective amount”, this being sufficient to show benefit to the individual. The actual amount administered, and rate and time-course of administration, will depend on the nature and severity of what is being treated. For injection, the pharmaceutical composition according to the present invention may be provided for example in a pre-filled syringe.

[0323] The inventive pharmaceutical composition as defined herein can also be administered orally in any orally acceptable dosage form including, but not limited to, capsules, tablets, aqueous suspensions or solutions. In the case of tablets for oral use, carriers commonly used include lactose and corn starch. Lubricating agents, such as magnesium stearate, are also added. For oral administration in a capsule form, useful diluents include lactose and dried cornstarch. When aqueous suspensions are required for oral use, the active ingredient, i.e, the inventive transporter cargo conjugate molecule as defined herein, is combined with emulsifying and suspending agents. In embodiments, certain sweetening, flavoring or coloring agents can also be added.

[0324] The inventive pharmaceutical composition can also be administered topically, especially when the target of treatment includes areas or organs readily accessible by topical application, e.g. including diseases of the skin or of any other accessible epithelial tissue. Suitable topical formulations are readily prepared for each of these areas or organs. For topical applications, the inventive pharmaceutical composition can be formulated in a suitable ointment, containing the inventive pharmaceutical composition, for example its components as defined herein, suspended or dissolved in one or more carriers. Carriers for topical administration include, but are not limited to, mineral oil, liquid petrolatum, white petrolatum, propylene glycol, polyoxyethylene, polyoxypropylene compound, emulsifying wax and water. Alternatively, the inventive pharmaceutical composition can be formulated in a suitable lotion or cream. In the context of the present invention, suitable carriers include, but are not limited to, mineral oil, sorbitan monostearate, polysorbate 60, cetyl esters wax, cetearyl alcohol, 2-octyldodecanol, benzyl alcohol and water.

[0325] Suitable dose ranges can depend on the antibody (or fragment) and on the nature of the formulation and route of administration. For example, doses of antibodies in the range of 0.1-50 mg/kg, 1-50 mg/kg, 1-10 mg/kg, 1, 1.25, 1.5, 2, 2.5, 3, 3.5, 4, 4.5, 5, 5.5, 6, 6.5, 7, 7.5, 8, 8.5, 9, 9.5 or 10 mg/kg of antibody can be used. If antibody fragments are administered, then less antibody can be used (e.g., from 5 mg/kg to 0.01 mg/kg). In other embodiments, the antibodies of the invention can be administered at a suitable fixed dose, regardless of body size or weight. See Bai et al. Clinical Pharmacokinetics February 2012, Volume 51, Issue 2, pp 119-135.

[0326] Dosage also depends on whether the composition is administered as a recombinant protein or a nucleic acid.

[0327] Dosage treatment can be a single dose schedule or a multiple dose schedule. For example, the pharmaceutical composition can be provided as single-dose product. In certain embodiments, the amount of the antibody in the pharmaceutical composition—for example if provided as single-dose product--does not exceed 200 mg. In certain embodiments, the amount does not exceed 100 mg, and in certain embodiments, the amount does not exceed 50 mg.

[0328] In non-limiting embodiments, the antibodies of the invention can be used for non-therapeutic uses, such as but not limited to diagnostic assays. In non-limiting embodiments, the antibodies can be used for serology testing in any suitable assay or format, including without limitation sandwich ELISA based detection.

### Administration of Antibody Encoding Nucleic Acid Sequences

[0329] In some embodiments the antibodies are administered as nucleic acids, including but not limited to mRNAs which can be modified and/or unmodified. See US Pub 20180028645A1,, US Pub 20090286852, US Pub 20130111615, US Pub 20130197068, US Pub 20130261172, US Pub 20150038558, US Pub 20160032316, US Pub 20170043037, US Pub 20170327842, U.S. Pat. Nos. 10,006,007, 9,371,511, 9,012,219, US Pub 20180265848, US Pub

[0330] 20170327842, US Pub 20180344838A1 at least at paragraphs-[0281], WO/2017/182524 for non-limiting embodiments of chemical modifications, wherein each content is incorporated by reference in its entirety.

[0331] mRNAs delivered in LNP formulations have advantages over non-LNPs formulations. See US Pub 20180028645A1, WO/2018/081638, WO/2016/176330, wherein each content is incorporated by reference in its entirety.

[0332] In certain embodiments the nucleic acid encoding an envelope is operably linked to a promoter inserted an expression vector. In certain aspects the compositions comprise a suitable carrier. In certain aspects the compositions comprise a suitable adjuvant.

[0333] In certain aspects the invention provides an expression vector comprising any of the nucleic acid sequences of the invention, wherein the nucleic acid is operably linked to a promoter. In certain aspects the invention provides an expression vector comprising a nucleic acid sequence encoding any of the polypeptides of the invention, wherein the nucleic acid is operably linked to a promoter. In certain embodiments, the nucleic acids are codon optimized for expression in a mammalian cell, in vivo or in vitro. In certain aspects the invention provides nucleic acids comprising any one of the nucleic acid sequences of invention. In certain aspects the invention provides nucleic acids consisting essentially of any one of the nucleic acid sequences of invention. In certain aspects the invention provides nucleic acids consisting of any one of the nucleic acid sequences of invention. In certain embodiments the nucleic acid of the invention, is operably linked to a promoter and is inserted in an expression vector. In certain aspects the invention provides an immunogenic composition comprising the expression vector.

[0334] In certain aspects the invention provides a composition comprising at least one of the nucleic acid sequences of the invention. In certain aspects the invention provides a composition comprising any one of the nucleic acid sequences of invention. In certain aspects the invention provides a composition comprising at least one nucleic acid sequence encoding any one of the polypeptides of the invention.

[0335] In one embodiment, the nucleic acid is an RNA molecule. In one embodiment, the RNA molecule is transcribed from a DNA sequence described herein. In some embodiments, the RNA molecule is encoded by one of the inventive sequences. In another embodiment, the nucleotide sequence comprises an RNA sequence transcribed by a DNA sequence encoding the polypeptide sequence of the sequences in the application, or a variant thereof or a fragment thereof. Accordingly, in one embodiment, the invention provides an RNA molecule encoding one or more of inventive antibodies. The RNA may be plus-stranded. Accordingly, in some embodiments, the RNA molecule can be translated by cells without needing any intervening replication steps such as reverse transcription.

[0336] In some embodiments, a RNA molecule of the invention may have a 5′ cap (e.g. but not limited to a 7-methylguanosine, 7 mG (5′) ppp (5′) NlmpNp). This cap can enhance in vivo translation of the RNA. The 5′ nucleotide of an RNA molecule useful with the invention may have a 5′ triphosphate group. In a capped RNA this may be linked to a 7-methylguanosine via a 5′-to-5′ bridge. A RNA molecule may have a 3′ poly-A tail. It may also include a poly-A polymerase recognition sequence (e.g. AAUAAA) near its 3′ end. In some embodiments, a RNA molecule useful with the invention may be single-stranded. In some embodiments, a RNA molecule useful with the invention may comprise synthetic RNA.

[0337] The recombinant nucleic acid sequence can be an optimized nucleic acid sequence. Such optimization can increase or alter the immunogenicity of the antibody. Optimization can also improve transcription and/or translation. Optimization can include one or more of the following: low GC content leader sequence to increase transcription; mRNA stability and codon optimization; addition of a kozak sequence (e.g., GCC ACC) for increased translation; addition of an immunoglobulin (Ig) leader sequence encoding a signal peptide; and eliminating to the extent possible cis-acting sequence motifs (i.e., internal TATA boxes).

[0338] In certain aspects, the invention provides an in vitro transcription system to synthesize ribonucleic acids (RNAs) encoding antibodies of the invention, comprising: a reaction vessel, a DNA vector template comprising nucleic acid sequence encoding an antibody of the invention as described in Tables 3-6, 10 or 11, and reagents for carrying out an in vitro transcription reaction that produces mRNA encoding an antibody or fragment thereof of the invention. In certain embodiments the mRNA is modified mRNA.

[0339] In certain aspects, the invention provides an in vitro transcription system to synthesize ribonucleic acids (RNAs) encoding antibodies of the invention, comprising: a reaction vessel, a DNA vector template comprising nucleic acid sequence encoding an antibody of the invention as described in Tables 3-6, 10 or 11, and reagents for carrying out an in vitro transcription reaction that produces mRNA encoding an antibody or fragment thereof of the invention. Methods to purify mRNA and assay its purity for therapeutic use are known in the art. In certain embodiments the mRNA is modified mRNA. A skilled artisan can readily scale up the in vitro transcription reaction methods, purification and analytical methods for large scale mRNA batches.

### Therapeutic Methods

[0340] In certain aspects, the invention provides prophylactic and/or therapeutic methods comprising administering the antibodies of the invention in an amount suitable to effect prophylaxis or treatment. In certain embodiments, the methods of administering antibodies lead to protection from acquiring of infection, or reducing severity of infection or disease by binding coronavirus spike protein and neutralizing coronavirus. Therapeutic doses depend on the mode of delivery and whether the antibody is delivered as a recombinant protein or a nucleic acid.

### Diagnostic Methods

[0341] In certain aspects the invention provides methods for detecting coronavirus virus in a sample suspected of containing said coronavirus virus, comprising (1) contacting the sample with a first antibody or antigen-binding fragment thereof binding coronavirus, and assaying binding of the antibody with said sample for formation of first antibody-coronavirus sample, wherein in some embodiments the first antibody is immobilized on a suitable surface or the first antibody-coronavirus complex is immobilized, (2) removing unbound sample and/or first coronavirus antibody, (3) contacting the immobilized first antibody-coronavirus sample complex with a second antibody, and assaying binding of the second coronavirus antibody to the first antibody-coronavirus complex, wherein the second antibody has a different binding epitope from the first antibody, and wherein the first and/or the second antibody is any one of the antibodies of the invention, e.g. Table 3-6, 10 or 11. Techniques to assay and quantitate binding between antibody and target epitope in a sample are known in the art. In certain embodiments, the second antibody is conjugated for direct detection. In non-limiting embodiments, the antibody-coronavirus complex is indirectly detected by a detection reagent which binds the second coronavirus antibody. In non-limiting embodiments, the detection reagent can be another antibody conjugated to comprises any suitable imaging agent including without limitation color detection, a fluorophore, a magnetic nano-particle, or a radionuclide. Non-limiting examples include any variation of ELISA sandwich-based immunoassay.

[0342] In certain embodiments, the sample is any suitable sample including but not limited to respiratory tract secretions, saliva, nasal swabs, etc.

[0343] In certain aspects, the invention provides kits comprising the inventive antibodies, reagents and instructions for therapeutic or diagnostic use.

[0344] CDRs can be identified by any method known in the art. In some embodiment, CDRs as identified are identified using IMGT.

TABLE 3
Summary of antibodies (includes DH nomenclature, VH and VL IDs and gene information,
specificity and clonal relationship). See also FIGS. 20-21 for sequences.

| CH/HG/DH | | | | | | | | Clonal |
|---|---|---|---|---|---|---|---|---|
| # | PTID | Ab ID | VH ID | VL ID | VH gene | VL gene | Notes | Relationship(s) |
| DH1041 | 001-ED- | Ab026124_LS | pH026124_LS.v2 | pL024055.v2 | IGHV3- | IGLV1- | RBD-specific, | |
| | 026 | | | | 7*02 | 40*01 | ACE2-blocking | |
| | | | | | | | Nab | |
| DH1042 | 001-ED- | Ab026103_LS | pH026103_LS.v2 | pK023879.v2 | IGHV1- | IGKV1- | RBD-specific, | |
| | 026 | | | | 69*04 | 39*01 | ACE2-blocking | |
| | | | | | | | Nab | |
| DH1043 | 001-ED- | Ab026116_LS | pH026116_LS.v2 | pK023888.v2 | IGHV1- | IGKV3- | RBD-specific, | |
| | 026 | | | | 69*04 | 20*01 | ACE2-blocking | |
| | | | | | | | Nab | |
| DH1044 | 001-ED- | Ab026077_LS | pH026077_LS.v2 | pL024038.v2 | IGHV3-30- | IGLV1- | RBD-specific, | |
| | 026 | | | | 5*01 | 51*02 | non-ACE2- | |
| | | | | | | | blocking Nab | |
| DH1045 | 001-ED- | Ab026066_LS | pH026066_LS.v2 | pL024032_{—} | IGHV4- | IGLV6- | RBD-specific, | |
| | 026 | | | L024042.v2 | 39*01 | 57*02 | Cross-reactive | |
| DH1046 | VRC200 | Ab026204_LS | pH026204_LS.v2 | pK023942.v2 | IGHV3- | IGKV1- | RBD-specific, | |
| | | | | | 23D*02 | 5*03 | Cross-reactive | |
| DH1047 | VRC200 | Ab712384_LS | pH712384_LS.v2 | pK711897.v2 | IGHV1- | IGKV4- | RBD-specific, | |
| | | | | | 46*03 | 1*01 | Cross-reactive | |
| DH1048 | 001-ED- | Ab712160_LS | pH712160_LS.v2 | pK711782.v2 | IGHV3- | IGKV1- | NTD Nab | |
| | 026 | | | | 48*02 | 33*01 | | |
| DH1049 | 001-ED- | Ab712522_G1.4A | pH712522_LS.v2 | pL711764.v2 | IGHV1- | IGLV1- | NTD Nab | |
| | 029 | | | | 24*01 | 51*02 | | |
| DH1050.1 | 001-ED- | Ab026016_LS | pH026016_LS.v2 | pL024008.v2 | IGHV1- | IGLV2- | NTD Nab | Clonal |
| | 026 | | | | 24*01 | 8*01 | | lineage |
| DH1050.2 | 001-ED- | Ab712213_LS | pH712213_LS.v2 | pL711598.v2 | IGHV1- | IGLV2- | NTD Nab | |
| | 026 | | | | 24*01 | 8*01 | | |
| DH1051 | 001-ED- | Ab026013_LS | pH026013_LS.v2 | pL024005.v2 | IGHV3- | IGLV3- | NTD Nab | |
| | 026 | | | | 33*01 | 10*01 | | |
| DH1052 | 001-ED- | Ab711733_G1.4A | pH711733_G1.4A | pK711421.v2 | IGHV1-69- | IGKV3- | NTD ADE | |
| | 026 | | | | 2*01 | 20*01 | | |
| DH1053 | 001-ED- | Ab026107_LS | pH026107_LS.v2 | pK023882.v2 | IGHV3- | IGKV1- | NTD ADE | |
| | 026 | | | | 43*01 | 5*03 | | |
| DH1054 | 001-ED- | Ab712151_LS | pH712151_LS.v2 | pL711550.v2 | IGHV3- | IGLV3- | NTD ADE | |
| | 026 | | | | 53*01 | 21*01 | | |
| DH1055 | 001-ED- | Ab025976_LS | pH025976_LS.v2 | pK023811.v2 | IGHV2- | IGKV3- | NTD ADE | |
| | 026 | | | | 70*01 | 20*01 | | |
| DH1056 | 001-ED- | Ab025988_LS | pH025988_LS.v2 | pK023817.v2 | IGHV4- | IGKV1- | NTD ADE | |
| | 026 | | | | 39*01 | 17*01 | | |
| DH1057 | 001-ED- | Ab025934_G1.4A | pH025934_G1.4A | pK023788.v2 | IGHV1- | IGKV3- | S2 Nab | |
| | 026 | | | | 46*01 | 11*01 | | |
| DH1058 | 001-ED- | Ab711725_G1.4A | pH711725_G1.4A | pK711414.v2 | IGHV3-30- | IGKV1- | S2 non-Nab, | |
| | 026 | | | | 5*01 | 9*01 | broadly cross- | |
| | | | | | | | reactive | |

TABLE 4A
Summary of antibodies (including DH names, specificity groups and blocking,
cross-reactivity, IC50, etc.). See FIGS. 20-21 for sequences.

| | | | | | Blocking | |
|---|---|---|---|---|---|---|
| Binding | | DH | | | IC50 | IC80 |
| Domain | Group | number | Antibody ID | Cross Reactivity | (μg/ml) | (μg/ml) |
| RBD | ACE2-blocking | DH1041 | Ab026124_LS | No | <0.2 | 0.497 |
| | Nab | DH1042 | Ab026103_LS | No | <0.2 | 0.371 |
| | | DH1043 | Ab026116_LS | No | <0.2 | 0.28 |
| | non-ACE2- | DH1044 | Ab026077_LS | No | >50 | >50 |
| | blocking Nab | | | | | |
| | Cross-reactive | DH1045 | Ab026066_LS | SARS-CoV-1 | 0.226 | 24.353 |
| | | DH1046 | Ab026204_LS | SARS-CoV-1 | 0.201 | 6.512 |
| | | DH1047 | Ab712384_LS | SARS-CoV-1 | 0.078 | 0.567 |
| NTD | NTD Nab | DH1048 | Ab712160_LS | No | >50 | >50 |
| | | DH1049 | Ab712522_G1.4A | No | >50 | >50 |
| | | DH1050.2 | Ab712213_LS | No | >50 | >50 |
| | | DH1051 | Ab026013_LS | No | >50 | >50 |
| | | DH1050.1 | Ab026016_LS | No | >50 | >50 |
| | NTD; non- | DH1052 | Ab711733_G1.4A | No | >50 | >50 |
| | neutralizing | | | | | |
| | NTD; Non- | DH1053 | Ab026107_LS | No | >50 | >50 |
| | neutralizing | | | | | |
| | NTD; Non- | DH1054 | Ab712151_LS | No | >50 | >50 |
| | neutralizing | | | | | |
| | NTD; Non- | DH1055 | Ab025976_LS | No | >50 | >50 |
| | neutralizing | | | | | |
| | NTD; Non- | DH1056 | Ab025988_LS | No | >50 | >50 |
| | neutralizing | | | | | |
| S2 | S2 Nab | DH1057 | Ab025934_G1.4A | SARS-CoV-1, | >50 | >50 |
| | | | | OC43 | | |
| | S2 non-Nab, | DH1058 | Ab711725_G1.4A | SARS-CoV-1, | >50 | >50 |
| | broadly cross- | | and clonal lineage | MERS-CoV, 229E, | | |
| | reactive | | members | NL63, HKU1, | | |
| | | | | OC43 | | |

| | | | | SARS-CoV-2 neutralization | | | |
|---|---|---|---|---|---|---|---|
| | | | | Minimal | | | |
| | Pseudovirus neutralization | | | Effective | | | |
| Binding | IC50 | IC80 | | conc. | IC50 | IC80 | IC90 |
| Domain | (μg/ml) | (μg/ml) | MPI | (μg/ml) | (μg/ml) | (μg/ml) | (μg/ml) |
| RBD | 0.017 | 0.049 | 100 | <0.098 | 0.016 | 0.063 | 0.143 |
| | 0.011 | 0.053 | 100 | 0.28 | 0.071 | 0.269 | 0.578 |
| | 0.0015 | 0.02 | 100 | <0.098 | 0.034 | 0.099 | 0.169 |
| | 0.021 | 0.08 | 98 | 0.55 | 0.076 | 0.273 | 0.577 |
| | 0.38 | 2.26 | 100 | 6.25 | 1.437 | 4.827 | 9.806 |
| | 0.396 | 2.03 | 100 | 12.5 | 1.086 | 9.383 | 17.55 |
| | 0.09 | 0.36 | 100 | 1.1 | 0.1244 | 0.6656 | 1.775 |
| NTD | 0.52 | >50 | 72 | 0.39 | 0.608 | 2.232 | 4.775 |
| | >50 | >50 | 49 | 0.39 | 0.385 | 3.539 | 12.89 |
| | 0.28 | >50 | 67 | 0.78 | 0.087 | 1.187 | 5.47 |
| | 0.049 | >50 | 68 | 0.78 | 0.134 | 0.737 | 1.995 |
| | 0.039 | >50 | 62 | 0.78 | 0.161 | 0.614 | 1.341 |
| | >50 | >50 | −148 | >100 | ND | ND | ND |
| | >50 | >50 | −99 | >100 | ND | ND | ND |
| | >50 | >50 | −63 | >100 | ND | ND | ND |
| | >50 | >50 | −106 | >100 | ND | ND | ND |
| | >50 | >50 | −56 | >100 | ND | ND | ND |
| S2 | >50 | >50 | 46 | 17.68 | 10.89 | 44.1 | 99.93 |
| | >43.5 | >43.5 | −13 | >100 | ND | ND | ND |

TABLE 4B
Summary of antibodies (including DH names). See FIGS. 22 and 23 for sequences.

| | | | | | | Neutralization | | | | | |
|---|---|---|---|---|---|---|---|---|---|---|---|
| | | | | | | | | | SARS-CoV-2 virus | | |
| | | | | ACE-2 Blocking | | Pseudovirus | | | Minimal | | |
| | | Binding | Cross | IC50 | IC80 | IC50 | IC80 | | Effective | IC50 | IC80 |
| DH# | Antibody ID | Specificity | Reactivity | (μg/ml) | (μg/ml) | (μg/ml) | (μg/ml) | MPI | conc. (μg/ml) | (μg/ml) | (μg/ml) |
| DH1221 | Ab712564_LS | RBD | No | 0.0343 | 0.06815 | 0.004 | 0.015 | 100 | <0.0976 | 0.007167 | 0.04929 |
| DH1222 | Ab712581_LS | RBD | No | 0.03664 | 0.06599 | 0.010 | 0.031 | 100 | <0.0976 | 0.009418 | 0.01559 |
| DH1223 | Ab712587_LS | RBD | No | 0.02763 | 0.06656 | 0.003 | 0.031 | 100 | <0.0976 | 0.005281 | 0.08982 |
| DH1224 | Ab712589_LS | RBD | No | 0.03083 | 0.06511 | 0.009 | 0.032 | 100 | <0.0976 | 0.009225 | 0.02679 |
| DH1225 | Ab712593_{—} | RBD | No | 0.03705 | 0.07397 | 0.006 | 0.015 | 100 | <0.0976 | 0.008233 | 0.02512 |
| | 712600K_LS | | | | | | | | | | |
| DH1226 | Ab712611_LS | RBD | No | 0.04159 | 0.105 | 0.008 | 0.032 | 100 | <0.0976 | 0.009656 | 0.04587 |

TABLE 4C
Gene usage of antibodies from Table 4B

| CH/HG/DH# | PTID | Ab ID | VH ID | VL ID | VH gene | VL gene | Notes |
|---|---|---|---|---|---|---|---|
| DH1221 | 001-ED- | Ab712564_LS/293i/Citrate | H712564 | K712022 | IGHV4- | IGKV2- | RBD-specific, |
| | 26 | | | | 31 | 24 | ACE2-blocking Nab |
| DH1222 | 001-ED- | Ab712581_LS/293i/Citrate | H712581 | K712032 | IGHV1- | IGKV1- | RBD-specific, |
| | 26 | | | | 69 | 39 | ACE2-blocking Nab |
| DH1223 | 001-ED- | Ab712587_LS/293i/Citrate | H712587 | K712037 | IGHV1- | IGKV3- | RBD-specific, |
| | 26 | | | | 69 | 15 | ACE2-blocking Nab |
| DH1224 | 001-ED- | Ab712589_LS/293i/Citrate | H712589 | K712038 | IGHV4- | IGKV2- | RBD-specific, |
| | 26 | | | | 31 | 24 | ACE2-blocking Nab |
| DH1225 | 001-ED- | Ab712593_712600K_LS/293i/Citrate | H712593 | K712041 | IGHV3- | IGKV3- | RBD-specific, |
| | 26 | | | | 66 | 20 | ACE2-blocking Nab |
| DH1226 | 001-ED- | Ab712611_LS/293i/Citrate | H712611 | K712052 | IGHV1- | IGKV2D- | RBD-specific, |
| | 26 | | | | 69 | 30 | ACE2-blocking Nab |

TABLE 4D
Shows summary of antibodies and gene usage. See FIG. 84, and FIG. 88.

| | Binding | Cross | Antibody gene analysis | | | | | | | | | |
|---|---|---|---|---|---|---|---|---|---|---|---|---|
| DH# | Specificity | Reactivity | VH | LENGTH | H_MUT | VH_Gene | JH_Gene | VL | LENGTH.1 | L_MUT | VL_Gene | JL_Gene |

| | | | | | | | | | | |
|---|---|---|---|---|---|---|---|---|---|---|
| DH | RBD | SARS- | 63 | 2% | IGHV3-48 | IGHJ4 | 27 | 2% | IGLV4-60 | IGLJ2 |
| 1235 | | CoV-1 | | | | | | | | |
| DH | RBD | SARS- | 69 | 2% | IGHV6-1 | IGHJ5 | 33 | 1% | IGLV1-44 | IGLJ1 |
| 1236 | | CoV-1 | | | | | | | | |
| DH | RBD | No | 16 | 2% | IGHV1-69 | IGHJ6 | 9 | 1% | IGKV1-39 | IGKJ2 |
| 1042 | | | | | | | | | | |
| DH | RBD | SARS- | 24 | 8% | IGHV1-46 | IGHJ4 | 9 | 2% | IGKV4-1 | IGKJ1 |
| 1047 | | CoV-1, | | | | | | | | |
| | | PCoV | | | | | | | | |
| | | GXP4L, | | | | | | | | |
| | | BCoV | | | | | | | | |
| | | RsSHC014, | | | | | | | | |
| | | BCoV | | | | | | | | |
| | | RaTG13 | | | | | | | | |
| DH | RBD | SARS- | 15 | 9% | IGHV1-46 | IGHJ6 | 11 | 3% | IGKV3-11 | IGKJ1 |
| 1073 | | CoV-1 | | | | | | | | |

[0345] Tables 4A, 4B, 4C and 4D are referred collectively as Table 4.

TABLE 5
Summary listing of antibodies and corresponding sequences (See FIG. 20 and 21).

| | DH | Ab ID | Heavy chain ID | Light chain ID |
|---|---|---|---|---|
| 1 | 1041 | Ab026124_LS | pH026124_LS.v2 | pL024055.v2 |
| 2 | 1042 | Ab026103_LS | pH026103_LS.v2 | pk023879.v2 |
| 3 | 1043 | Ab026116_LS | pH026116_LS.v2 | pk023888.v2 |
| 4 | 1044 | Ab026077_LS | pH026077_LS.v2 | pL024038.v2 |
| 5 | 1045 | Ab026066_LS | pH026066_LS.v2 | pL024032_L024042.v2 |
| 6 | 1046 | Ab026204_LS | pH026204_LS.v2 | pk023942.v2 |
| 7 | 1047 | Ab712384_LS | pH712384_LS.v2 | pK711897.v2 |
| 8 | 1048 | Ab712160_LS | pH712160_LS.v2 | pK711782.v2 |
| 9 | 1049 | Ab712522_G1.4A | pH712522_G1.4A | pL711764.v2 |
| 10 | 1050.2 | Ab712213_LS | pH712213_LS.v2 | pL711598.v2 |
| 11 | 1051 | Ab026013_LS | pH026013_LS.v2 | pL024005.v2 |
| 12 | 1050.1 | Ab026016_LS | pH026016_LS.v2 | pL024008.v2 |
| 13 | 1052 | Ab711733_G1.4A | pH711733_G1.4A | pK711421.v2 |
| 14 | 1053 | Ab026107_LS | pH026107_LS.v2 | pk023882.v2 |
| 15 | 1054 | Ab712151_LS | pH712151_LS.v2 | pL711550.v2 |
| 16 | 1055 | Ab025976_LS | pH025976_LS.v2 | pK023811.v2 |
| 17 | 1056 | Ab025988_LS | pH025988_LS.v2 | pK023817.v2 |
| 18 | 1057 | Ab025934_G1.4A | pH025934_G1.4A | pk023788.v2 |
| 19 | 1058 | Ab711725_G1.4A | pH711725_G1.4A | pK711414.v2 |

TABLE 6
Summary listing of antibodies and corresponding
VH and VL (See FIG. 20 and 21).

| | | | VHeavy | VLight |
|---|---|---|---|---|
| | DH | Ab ID | chain ID | chain ID |
| 1 | 1041 | Ab026124_LS | H026124_{—} | L024055 |
| 2 | 1042 | Ab026103_LS | H026103_{—} | K023879 |
| 3 | 1043 | Ab026116_LS | H026116_{—} | K023888 |
| 4 | 1044 | Ab026077_LS | H026077_{—} | pL024038 |
| 5 | 1045 | Ab026066_LS | H026066_{—} | L024032_L024042 |
| 6 | 1046 | Ab026204_LS | H026204_{—} | K023942 |
| 7 | 1047 | Ab712384_LS | H712384_{—} | K711897 |
| 8 | 1048 | Ab712160_LS | H712160_{—} | K711782 |
| 9 | 1049 | Ab712522_G1.4A | H712522_{—} | L711764 |
| 10 | 1050.2 | Ab712213_LS | H712213_{—} | L711598 |
| 11 | 1051 | Ab026013_LS | H026013_{—} | L024005 |
| 12 | 1050.1 | Ab026016_LS | H026016_{—} | L024008 |
| 13 | 1052 | Ab711733_G1.4A | H711733_{—} | K711421 |
| 14 | 1053 | Ab026107_LS | H026107_{—} | K023882 |
| 15 | 1054 | Ab712151_LS | H712151_{—} | L711550 |
| 16 | 1055 | Ab025976_LS | H025976_{—} | K023811 |
| 17 | 1056 | Ab025988_LS | H025988_{—} | K023817 |
| 18 | 1057 | Ab025934_G1.4A | H025934_{—} | K023788 |
| 19 | 1058 | Ab711725_G1.4A | H711725_{—} | K711414 |

[0346] Table 7 shows summary of cross-competition of RBD and NTD Abs, where (−) means a ternary complex is formed, i.e, no competition. (+) means a complex is not formed, indicating no binding due to competition.

| | 712160 | 712213 | 026016 | 026013 | 711733 |
|---|---|---|---|---|---|
| MAb | (DH1048) | (DH1050.2) | (DH1050.1) | (DH1051) | (DH1052) |
| 026124 | − | − | − | − | − |
| (DH1041) | | | | | |
| 026116 | − | − | − | − | − |
| (DH1043) | | | | | |
| 026077 | − | − | − | − | − |
| (DH1044) | | | | | |
| 026204 | − | − | − | − | − |
| (DH1046) | | | | | |
| 712384 | − | − | − | − | − |
| (DH1047) | | | | | |

[0347] Table 8 shows summary of cross-competition of RBD antibodies, where (−) means a ternary complex is formed, i.e, no competition. (+) means a complex is not formed, indicating no binding due to competition.

| | 026124 | 026116 | 026077 | 026204 | 712384 |
|---|---|---|---|---|---|
| MAb | (DH1041) | (DH1043) | (DH1044) | (DH1046) | (DH1047) |
| 026124 | + | + | + | − | − |
| (DH1041) | | | | | |
| 026116 | + | + | + | − | − |
| (DH1043) | | | | | |
| 026077 | + | + | + | − | − |
| (DH1044) | | | | | |
| 026204 | − | − | − | + | + |
| (DH1046) | | | | | |
| 712384 | − | − | − | + | + |
| (DH1047) | | | | | |

[0348] Table 9 shows summary of Cross-competition of NTD Abs, where (−) means a ternary complex is formed, i.e, no competition. (+) means a complex is not formed, indicating no binding due to competition.

| | 712160 | 712213 | 026016 | 026013 | 711733 |
|---|---|---|---|---|---|
| MAb | (DH1048) | (DH1050.2) | (DH1050.1) | (DH1051) | (DH1052) |
| 712160 | + | + | + | + | − |
| (DH1048) | | | | | |
| 712213 | + | + | + | + | − |
| (DH1050.2) | | | | | |
| 026016 | + | + | + | + | − |
| (DH1050.1) | | | | | |
| 026013 | + | + | + | + | − |
| (DH1051) | | | | | |
| 711733 | − | − | − | − | + |
| (DH1052) | | | | | |

TABLE 10
Summary listing of antibodies and corresponding sequences (See FIG. 22 and 23).

| DH # | Ab ID | VH ID | VL ID |
|---|---|---|---|
| DH1221 | Ab712564_LS | pH712564_LS.v2 | pK712022.v2 |
| DH1222 | Ab712581_LS | pH712581_LS.v2 | pK712032.v2 |
| DH1223 | Ab712587_LS | pH712587_LS.v2 | pK712037.v2 |
| DH1224 | Ab712589_LS | pH712589_LS.v2 | pK712038.v2 |
| DH1225 | Ab712593_712600K_LS | pH712593_H712600_LS.v2 | pK712041.v2 |
| DH1226 | Ab712611_LS | pH712611_LS.v2 | pK712052.v2 |

TABLE 11
Summary listing of antibodies and corresponding
VH and VL (See FIG. 22 and 23).

| DH # | Ab ID | VH ID | VL ID |
|---|---|---|---|
| DH1221 | Ab712564_LS | H712564 | K712022 |
| DH1222 | Ab712581_LS | H712581 | K712032 |
| DH1223 | Ab712587_LS | H712587 | K712037 |
| DH1224 | Ab712589_LS | H712589 | K712038 |
| DH1225 | Ab712593_712600K_LS | H712593_H712600_{—} | K712041 |
| DH1226 | Ab712611_LS | H712611 | K712052 |

[0349] Table 12 shows Cross-competition of RBD Abs where (−) means a ternary complex is formed, i.e, no competition. (+) means a complex is not formed, indicating blocked binding due to competition.

| MAb | DH1221 | DH1222 | DH1223 | DH1224 | DH1225 | DH1226 | DH1043 | DH1047 |
|---|---|---|---|---|---|---|---|---|
| DH1221 | + | + | + | + | + | + | + | − |
| DH1222 | + | + | + | + | + | + | + | − |
| DH1223 | + | + | + | + | + | + | + | − |
| DH1224 | + | + | + | + | + | + | + | − |
| DH1225 | + | + | + | + | + | + | + | − |
| DH1226 | + | + | + | + | + | + | + | − |
| DH1043 | + | + | + | + | + | + | + | − |
| DH1047 | − | − | − | − | − | − | − | + |

[0350] FIG. 74 SPR competition experiments with DH1047, DH1046, DH1073 and DH1235. DH1047, DH1046, and DH1235 were outcompeted by one another (FIG. 74D), whereas DH1073 was not, indicating that DH1073 targets a distinct non-cross-competing epitope. Thus, in certain non-limiting embodiments, antibodies targeting non-cross-competing epitopes can be used in a combination treatment. In non-limiting embodiments, the combination comprises DH1073 antibody or antigen binding fragment thereof, and any other non-cross-competing antibody, e.g. without limitation DH1047, DH1046, or DH1042.

### EXAMPLES

### Example 1-Antibody Isolation

[0351] Antibodies were isolated and lineages were identified as previously published.

[0352] 1. Liao H X, Levesque M C, Nagel A, et al. High-throughput isolation of immunoglobulin genes from single human B cells and expression as monoclonal antibodies. J Virol Methods. 2009: 158 (1-2): 171-179.

[0353] 2. Kepler T B, Munshaw S, Wiehe K, et al. Reconstructing a B-Cell Clonal Lineage. II. Mutation, Selection, and Affinity Maturation. Front Immunol. 2014:5:170.

[0354] FIGS. 20-25 and Examples DH1041 and DH043 show non-limiting embodiments of nucleic acids encoding antibodies of the invention.

[0355] In one embodiment, the IgG constant region comprises the LS mutation. Embodiments also comprise additional variants of the Fc portion of the antibody. See Maeda et al. MAbs. 2017 July: 9 (5): 844-853. Published online 2017 Apr. 7, PMID: 28387635.

[0356] For L S mutation See e.g. Gaudinski M R, Coates E E, Houser K V, Chen G L, Yamshchikov G, Saunders J G, et al. (2018) Safety and pharmacokinetics of the Fc-modified HIV-1 human monoclonal antibody VRCOILS: A Phase 1 open-label clinical trial in healthy adults. PLOS Med 15 (1): e1002493, https://doi.org/10.1371/journal.pmed. 100249.

### Example 2-Binding and Neutralization Assays

[0357] ELISA binding assays were characterized essentially as described in Edwards et al. Cold sensitivity of the SARS-COV-2 spike ectodomain, Jul. 13, 2020 doi: 10.1101/2020.07.12.199588, published on biorxiv.org--content/10.1101/2020.07.12.199588v1).

[0358] In some embodiments of the PRNT assay, Vero cells were used. In some embodiments of the pseudovirus assay, 293T/ACE2 (293T that overexpressed human ACE2) were used.

### Example 3-Cross Blocking and Cross Reactivity to Other Coronaviruses

[0359] Several of the antibodies do not cross-block each other in experiment of surface plasmon resonance assays. Binding and cross blocking analysis was conducted by standard SPR methods, where a first antibody is immobilized on the surface, an antigen is floated over and second antibody is floated over the complex. Results from these experiments are shown in Tables 7-9, 12 as a qualitative summary.

[0360] Table 8 shows the RBD antibodies that do or do not cross-block each other, Table 9 shows the NTD antibodies that do or do not block each other, and Table 7 shows the RBD and NTD antibodies that do not block each other. Those antibodies that do not block each other can be used in combinations of neutralizing antibodies for either prevention of SARS-COV-2 infection or for treatment of COVID-1 disease. Other antibodies listed in Tables 3-6, 10 or 11 that are not in the Tables 7-9, can also be combined for prevention or treatment by performing the same types of blocking experiments with surface plasmon resonance.

### Example 4-Animal Studies

[0361] Any other suitable coronavirus animal model can be used to characterize the antibodies of the invention. In non-limiting embodiments, a mouse, hamster, or NHP animal model is used to characterize the antibodies.

[0362] Animal studies may be designed using either recombinant protein or mRNA in composition suitable for mRNA delivery.

[0363] Methods for pharmacokinetic evaluation of an antibody in vivo are well known in the art.

### Example 5 the In Vitro and In Vivo Function of SARS-COV-2 Neutralizing Antibodies

[0364] SARS-COV-2 neutralizing antibodies (NAbs) protect against COVID-19, making them a focus of vaccine design. A safety concern regarding SARS-COV-2 antibodies is whether they mediate disease enhancement. Here, we isolated potent NAbs against the receptor-binding domain (RBD) and the N-terminal domain (NTD) of SARS-COV-2 spike protein from individuals with acute or convalescent SARS-COV-2 or a history of SARS-COV-1 infection. Cryo-electron microscopy of RBD and NTD antibodies demonstrated function-specific modes of antibody binding. Select RBD NAbs also demonstrated Fc receptor-y (FcγR)-mediated enhancement of virus infection in vitro, while five non-neutralizing NTD antibodies mediated FcγR-independent in vitro infection enhancement. However, both in vitro neutralizing and infection-enhancing RBD or infection-enhancing NTD antibodies protected from SARS-COV-2 challenge in non-human primates. Thus, these in vitro assessments of enhanced antibody-mediated infection do not indicate biologically relevant in vivo infection enhancement.

### INTRODUCTION

[0365] The severe acute respiratory syndrome coronavirus 2 (SARS-COV-2) has caused a global pandemic with over 43 million cases and 1.16 million deaths (https://coronavirus.jhu.edu/). Development of combinations of neutralizing antibodies for prevention or treatment of infection can help to control the pandemic, while the ultimate solution to control the COVID-19 pandemic is a safe and effective vaccine (1. 2).

[0366] Neutralizing antibodies (NAbs) that can block viral entry are crucial for controlling virus infections (3-5). Previously reported SARS-COV and MERS-COV NAbs function by targeting the receptor-binding domain (RBD) or the N-terminal domain (NTD) of spike(S) protein to block receptor binding, or by binding on the S2 region of S protein to interfere with S2-mediated membrane fusion (6-8). Prophylactic or therapeutic use of SARS-COV-2 NAbs in non-human primates (9) or rodent models (10-12) showed protection from SARS-COV-2-induced lung inflammation and/or reduction in viral load. SARS-COV-2 NAbs reported to date predominantly target the RBD region (9. 11-25). In contrast. NTD antibodies that neutralize SARS-COV-2 are rare and of modest neutralization potency (18. 19. 26. 27).

[0367] Antibody-dependent enhancement (ADE) of infection in vitro has been reported with a number of viruses. ADE has been associated with vaccination for respiratory syncytial virus (RSV), with vaccination for dengue virus, or with dengue virus infection (28). ADE is often mediated by Fcγ receptors for IgG (FcγRs), complement receptors (CRs) or both, and is most commonly observed in cells of monocyte/macrophage and B cell lineages (29. 30). In vitro studies have demonstrated FcγR-mediated ADE of SARS-COV-1 infection of ACE2-negative cells (31-37). One group demonstrated FcγR-independent infection enhancement of SARS-CoV-1 in Vero cells, and isolated a monoclonal antibody that can induce enhanced lung viral load and pathology in vivo (38). The ability of antibodies that bind the SARS-COV-2 S protein to mediate infection enhancement in vivo is unknown but is a concern for COVID-19 vaccine development (28. 29. 39).

[0368] Here, we identified potent in vitro neutralizing RBD and NTD antibodies as well as in vitro infection-enhancing RBD and NTD antibodies from individuals infected with SARS-CoV-1 or SARS-COV-2. Negative stain electron microscopy (NSEM) and cryo-electron microscopy (cryo-EM) revealed distinct binding patterns and the precise epitopes of infection-enhancing and neutralizing antibodies. In vitro studies using human FcγR-expressing or ACE2-expressing cell lines demonstrated that the RBD antibodies mediated FcγR-dependent infection enhancement, whereas the NTD antibodies induced FcγR-independent infection enhancement. However, using monkey models of SARS-COV-2 infection, none of these infection-enhancing antibodies augmented SARS-COV-2 lung viral load, infectious virus in the lung, or lung disease pathology in vivo. Rather, the in vitro infection-enhancing antibodies prevented or reduced virus replication in cynomolgus macaques or mice challenged with SARS-COV-2. Thus, the in vitro infection enhancing activity of SARS-COV-2 RBD and NTD antibodies did not translate to in vivo relevance.

### Results

### Isolation of Infection-Enhancing SARS-COV-2 Antibodies

[0369] SARS-COV-2-reactive human monoclonal antibodies from plasmablasts or SARS-CoV-2-reactive memory B cells were isolated by flow cytometric sorting (40. 41) from a SARS-COV-2 infected individual 11. 15. 36, and 70 days post-onset of symptoms. Additional memory B cells were isolated from an individual infected with SARS-COV-1 ˜17 years prior to sample collection (FIGS. 1A-B, FIGS. 7 and 8). We isolated and characterized 1.737 antibodies, which bound to SARS-COV-2 S and nucleocapsid (NP) proteins (FIG. 1C, FIG. 38). We selected 187 antibodies for further characterization, and first examined neutralization of SARS-COV-2 pseudovirus and replication-competent SARS-COV-2. Forty-four of 81 recombinant RBD antibodies exhibited neutralization when assayed in 293T/ACE-2 cell pseudovirus. SARS-COV-2 microneutralization, or SARS-COV-2 plaque reduction assays (FIGS. 9A9, FIGS. 39-40).

[0370] Ten of the forty-one NTD antibodies neutralized in the 293T/ACE2 pseudovirus and plaque reduction assays, with the most potent antibody neutralizing pseudovirus with an IC50 of 39 ng/ml (FIGS. 9G-I, FIGS. 41-42). In addition. 5 non-neutralizing NTD antibodies enhanced SARS-COV-2 pseudovirus infection in 293T/ACE2 cells by 56% to 148% (FIG. 1D)). To determine whether this effect was applicable to replication-competent virus, we tested these five antibodies for enhancement of SARS-COV-2 live virus infection of Vero cells. Infection of replication-competent SARS-COV-2 nano-luciferase virus (42) also increased in the presence of each of the 5 NTD antibodies (FIG. 1E). Both ACE2-expressing 293T cells used for pseudovirus assays and Vero cells lack FcγR expression (43). Thus. NTD enhancement of SARS-COV-2 infection was FcγR-independent.

[0371] Previous studies have demonstrated FcγR-mediated ADE of SARS-COV-1 infection in ACE2-negative cells (31-37). Here. FcγR-dependent infection enhancement was determined by generating stable TZM-bl cell lines that expressed individual human FcγRs (FcγRI. FcγRIIa. FcγRIIb or FcγRIII). TZM-bl cells naturally lack ACE-2 and TMPRSS2 receptors, thus SARS-CoV-2 was unable to infect TZM-bl FcγR-expressing TZM-bl cells (FIG. 1F). One hundred S-reactive IgG1 antibodies selected from FIGS. 38-45 were tested for their ability to facilitate SARS-COV-2 infection of TZM-bl cells. Three of the antibodies enabled SARS-COV-2 infection of TZM-bl cells expressing FcγRI, and five antibodies mediated infection of FcγRIIb-expressing TZM-bl cells (FIGS. 1F-J). Fab fragments of these antibodies abrogated infection enhancement of TZM-bl cells expressing FcγRI or FcγRIIb (FIGS. 1K-L). FcγRI and FcγRIIb-dependent infection-enhancing antibodies were specific for the RBD of S protein, consistent with a recent finding by another group using COVID-19 patient sera or a recombinant antibody (44). Thus. RBD antibodies can be either neutralizing in the 293T/ACE2 cell line, infection-enhancing in the TZM-bl-FcγR-expressing cell lines, or both (FIG. 2A). NTD antibodies can either be neutralizing or infection-enhancing in the 293T/ACE2 cell line or Vero E6 cells (FIG. 2A). Therefore, the repertoire of SARS-COV-2 antibodies included potent neutralizing RBD and NTD antibodies. FcγR-dependent, infection-enhancing RBD antibodies, and FcγR-independent infection-enhancing NTD antibodies.

### Characterization of Infection-Enhancing Spike Recombinant Antibodies

[0372] We compared the phenotypes and binding modes to S protein for five infection-enhancing RBD antibodies and three RBD antibodies that lacked infection enhancement to elucidate differences between these two types of antibodies. All selected RBD antibodies neutralized SARS-COV-2 pseudovirus and/or replication-competent virus in ACE2-expressing cells (FIG. 2A, FIG. 11), despite five of these antibodies mediating infection enhancement in ACE2-negative. FcγR-positive TZM-bl cells (FIGS. 1F-L and 2A,FIG. 11). Both types of selected RBD antibodies blocked ACE2 binding to S protein. Antibody antigen binding fragments (Fabs) of four of the infection-enhancing RBD antibodies and two of the non-infection-enhancing RBD antibodies bound to S with high affinities ranging from 0.1 to 9 nM (FIGS. 12-14). Thus, the infection-enhancing or non-enhancing RBD antibodies showed similarities in ACE2 blocking, affinity, and neutralization of ACE2-dependent SARS-COV-2 infection (FIG. 2A).

[0373] We obtained NSEM reconstructions of Fabs in complex with stabilized S ectodomain trimer for six of the eight representative RBD antibodies (45). Infection-enhancing RBD antibodies DH1041 and DH1043 bound with a vertical approach (FIG. 2B), parallel to the central axis of the S trimer, similar to non-infection-enhancing antibodies DH1042 and DH1044 (FIG. 2C). The epitopes of antibodies DH1041. DH1042, and DH1043 overlapped with that of the ACE-2 receptor (46), consistent with their ability to block ACE-2 binding to S protein (FIG. 2A and FIG. 16). Their epitopes were similar to those of three recently described antibodies. P2B-2F6 (47). H11-H4, and H11-D4 (FIG. 16) (48. 49). The epitope of another non-infection-enhancing RBD antibody DH1044 was only slightly shifted relative to DH1041.

[0374] DH1042 and DH1043 (FIG. 2C), but resulted in DH1044 not blocking ACE2 binding (FIG. 2A and FIG. 16). The remaining two RBD antibodies, DH1045 and DH1047 cross-reacted with both SARS-COV-1 and SARS-COV-2 S (FIG. 2A and FIG. 10). Although DH1047 mediated FcγR-dependent infection of TZM-bl cells and DH1045 did not, both antibodies bound to RBD-up S conformations with a more horizontal angle of approach (FIG. 2B-C and FIG. 16) (50). Thus, epitopes and binding angles of RBD antibodies determined by NSEM did not discriminate between antibodies that mediated FcγR-dependent infection enhancement and those that did not.

[0375] We performed similar comparative analyses of five FcγR-independent, infection-enhancing NTD antibodies, and five non-infection-enhancing NTD antibodies (DH1048. DH1049. DH1051. DH1050.1 and DH1050.2) that neutralized SARS-COV-2 (pseudovirus IC50 titers 39-520 ng/ml: SARS-COV-2 plaque reduction IC50 titers 390-780 ng/mL) (FIG. 2A and FIGS. 11C-D). The Fabs of neutralizing antibodies DH1050.1 and DH1051 bound to stabilized S ectodomain with affinities of 16 and 19 nM respectively, whereas the infection-enhancing antibody DH1052 bound with 294 nM affinity (FIGS. 12-14). NSEM reconstructions obtained for nine of the ten NTD antibodies showed that the FcγR-independent, infection-enhancing NTD antibodies (DH1053-DH1056) bound to S with their Fab constant domains directed downward toward the virus membrane (FIG. 2D), whereas the five neutralizing NTD-directed Abs (DH1048-DH1051) bound to S with the constant domain of the Fab directed upward away from the virus membrane (FIG. 2E). Thus. S protein antibody epitopes and binding modes were associated with FcγR-independent, infection-enhancing activity of NTD antibodies. The five neutralizing antibodies bound the same epitope as antibody 4A8 (17), with three of the five having the same angle of approach as 4A8 (FIG. 17). Interestingly, the NTD antibodies with the same angle of approach as 4A8, were also genetically similar to 4A8, being derived from the same Vul-24 gene segment (FIG. 45), although their light chains were different (17). These antibodies can constitute a neutralizing antibody class that can be reproducibly elicited upon SARS-COV-2 infection.

### Competition Between Infection-Enhancing and Non-Infection Enhancing Antibodies

[0376] To determine whether infection-enhancing antibodies can compete with non-infection-enhancing antibodies for binding to S ectodomain, we performed surface plasmon resonance (SPR) competitive binding assays. RBD antibodies segregated into two clusters, where antibodies within a cluster blocked each other and antibodies in different clusters did not block each other (FIG. 3A. FIG. 18). One cluster included antibodies DH1041. DH1043 and DH1044. and the other cluster included antibodies DH1046 and DH1047. NSEM reconstructions showed DH1041 and DH1047 Fabs bound simultaneously to different epitopes of the stabilized S trimer (FIG. 3B). DH1043 and DH1047 Fabs also bound simultaneously to different epitopes on the stabilized S protein (FIG. 3B).

[0377] NTD antibodies also segregated into two clusters based on their ability to block each other (FIG. 3A). Neutralizing NTD antibodies blocked each other and formed one cluster, while infection-enhancing/non-neutralizing NTD antibodies blocked each other and formed a second cluster (FIGS. 3A and C, FIGS. 18 and 19). NSEM reconstruction of SARS-COV-2 S trimer bound with Fabs of neutralizing NTD antibody DH1050.1 and infection-enhancing NTD antibody DH1052 confirmed that the two antibodies can simultaneously bind to distinct epitopes on a single SARS-COV-2 S trimer (FIG. 3D). DH1054 was unique as it was able to block both infection-enhancing and neutralizing NTD antibodies (FIG. 3C, FIG. 19).

[0378] NTD antibodies did not compete with RBD antibodies for binding to S trimer (FIG. 3A). This result gave rise to the notion that in a polyclonal mixture of antibodies, the SARS-CoV-2 S trimer can bind both RBD and NTD antibodies. To determine whether this complex can form, we liganded SARS-COV-2 S trimer with Fabs of each type of antibody and visualized the complex using NSEM. NSEM showed that neutralizing RBD antibodies can also bind to the same S protomer as neutralizing NTD antibodies DH1050.1 or DH1051 (FIG. 3E). Moreover, we found that a single S protomer can be occupied by two RBD antibodies (DH1043 and DH1047) and an NTD antibody (DH1050.1) (FIG. 3F). Thus, the S trimer can simultaneously bind to multiple RBD and NTD neutralizing antibody Fabs.

### FcγR-Independent Infection-Enhancement in the Presence of Neutralizing Antibodies

[0379] The NSEM determination of antibody binding modes demonstrated that certain infection-enhancing antibodies and non-infection enhancing antibodies bound to distinct epitopes on the same S protomer (FIG. 3A-F). Thus, we determined the functional outcome of infection-enhancing antibodies binding to S in the presence of neutralizing antibodies. We examined whether a FcγR-independent, infection-enhancing NTD antibody can inhibit RBD antibody neutralization of ACE-2-mediated SARS-COV-2 pseudovirus infection of 293T/ACE2 cells in vitro. Without wishing to be bound by theory, the outcome will be dependent on which antibody was present at the highest concentration. We examined RBD antibody DH1041 neutralization in the presence of 132 and 1.325-fold excess of infection-enhancing NTD antibody DH1052. DH1041 neutralization activity was minimally decreased in the presence of 132-fold excess of DH1052. When DH1041 neutralization was assessed in the presence of 1.325-fold excess of antibody DH1052, infection enhancement was observed when DH1041 concentration was below 10 ng/ml (FIG. 3G, FIG. 26). A nearly identical result was obtained when we examined neutralization by DH1043 (FIG. 3H, FIG. 26). Thus, a ˜1000-fold excess of infection-enhancing NTD antibody was required to out-compete a potent RBD neutralizing antibody in vitro.

### Cryo-EM Structural Determination of RBD and NTD-Directed Antibody Epitopes

[0380] To visualize atomic level details of their interactions with the S protein, we selected representatives from the panels of RBD and NTD-directed antibodies for structural determination by cryo-EM. Of the RBD-directed antibodies, we selected two (DH1041 and DH1043) that most potently neutralized SARS-COV-2 virus in the 293T/ACE2 pseudovirus assay and also enhanced infection in TZM-bl-FcγRI or—FcγRIIb cells. We also selected the RBD-directed antibody DH1047, which shared the infection enhancing and ACE-2 blocking properties of DH1041 and DH1043, but unlike DH1041 and DH1043. DH1047 also showed reactivity with the SARS-COV-1 S protein. From the panel of NTD-directed antibodies, we selected one infection-enhancing NTD antibody. DH1052, and one neutralizing NTD antibody. DH1050.1, for higher resolution structural determination by cryo-EM. The stabilized SARS-CoV-2 S ectodomain “2P” (S-2P) (51) was used for preparing complexes for structural determination.

[0381] For all three RBD-directed antibodies, the cryo-EM datasets revealed heterogeneous populations of S protein with at least one RBD in the “up” position (FIG. 4, FIGS. 27 and 28). We did not find any unliganded S or any 3-RBD-down S population, even though the unliganded S-2P consistently shows a 1:1 ratio of 1-RBD-up and 3-RBD-down populations (52. 53), indicating that binding of the RBD-directed antibodies to S protein alters RBD dynamics. All S-2P trimers were stoichiometrically bound to 3 Fabs, with antibodies bound to both up and down RBDs in an S-2P trimer.

[0382] We observed that the primary epitopes of DH1041 and DH1043 were centered on the Receptor Binding Motif (RBM: residues 483-506) of the RBD (FIG. 4A-B, FIGS. 29 and 30), providing structural basis for the ACE-2 blocking phenotype of these antibodies. While DH1041 utilized its heavy chain complementarity determining regions (CDRs) to contact the RBM, the DH1043 paratope included both its heavy and light chains.

[0383] Unlike the RBM-focused epitope of DH1041 and DH1043, the epitope of antibody DH1047 was focused around the a2 and a3 helices and B2 strand that are located outside the N-terminus of the RBM (FIG. 4C, FIG. 31) (54). Contact is also made by RBD residues 500-506 that are also outside the RBM but at its C-terminal end, and stack against the N-terminal end of the a3 helix providing a continuous interactive surface for DH1047 binding. The DH1047 paratope included heavy chain complementarity determining regions HCDR2. HCDR3 and light chain LCDR1 and LCDR3. The HCDR3 stacks against and interacts with the residues in the β2 strand. Interactions with the β2 strand are also mediated by HCDR2. Similar to DH1041 and DH1043, the DH1047 interacted with an “up” RBD conformation from an adjacent protomer although these interactions were not well-characterized due to disorder in that region.

[0384] We next determined cryo-EM structures of the NTD-directed neutralizing antibodies. DH1050.1 (FIG. 4D)) and NTD-directed infection-enhancing antibody. DH1052 (FIG. 4E), at 3.4 A and 3.0 A resolutions, respectively. Unlike the RBD-directed antibodies DH1041. DH1043 and DH1047, where we only observed spikes with at least one RBD in the up position, the cryo-EM datasets of DH1050.1—and DH1052-bound complexes showed antibody bound to both 3-RBD-down and 1-RBD-up S-2P spikes (FIGS. 32-33). Consistent with the NSEM reconstructions, the neutralizing antibody DH1050.1 and the non-neutralizing, infection-enhancing antibody DH1052 bound opposite faces of the NTD, with the epitope for the neutralizing antibody DH1050.1 facing the host cell membrane and the epitope for the non-neutralizing, infection-enhancing antibody DH1052 facing the viral membrane. The dominant contribution to the DH1050. 1 epitope came from NTD loop region 140-158 that stacks against the antibody HCDR3 and extends farther into a cleft formed at the interface of the DH1050.1 HCDR1. HCDR2 and HCDR3 loops. The previously described NTD antibody 4A8 interacts with the same epitope in a similar elongated HCDR3-dominated manner making similar contacts, although DH1050.1 and 4A8 (26) show a rotation about the stacked HCDR3 and NTD 140-158 loops, indicating focused recognition of the elongated NTD loop by a class of antibodies sharing the same VH origin. Consistent with their diverse light chain gene origins, the light chains of DH1050.1 and 4A8 do not contact the S protein. The focused recognition of the NTD loop 140-158 by DH1050.1 is reminiscent of the interactions that HIV-1 fusion peptide-directed antibodies make with the HIV-1 Env, where recognition is focused on the conserved region of the flexible fusion peptide (55. 56). In a structurally conserved mechanism, such focused recognition is characterized by robust cryo-EM density at the recognition site but increased disorder away from the site of focused interactions (FIG. 4E, FIG. 33).

[0385] The infection enhancing NTD-directed antibody DH1052 bound the NTD at an epitope facing the viral membrane and comprised of residues spanning 27-32. 59-62 and 211-218, with all the CDR loops of both heavy and light chains involved in contacts with the NTD. We also observed contact of the antibody with the glycan at position 603, as well as the conformationally invariant SD2 region.

[0386] Thus, we found that the RBD-directed antibodies isolated in this study influenced RBD dynamics and bound only to spike with at least one RBD in the up conformations, and in some cases, also induced the 2-RBD-up and 3-RBD-up spike conformations. In contrast, the NTD-directed antibodies bound to both the 3-RBD-down and 1-RBD-up spikes that are present in the unliganded S-2P. Our data provide a structural explanation for the ACE-2 blocking activity of RBD-directed antibodies as well as for the cross-reactivity of the DH1047 antibody. We observed two distinct orientations for the NTD-directed antibodies that are either neutralizing or non-neutralizing, with the former binding the NTD surface that faces away from the viral membrane and the latter binding the surface that faces the viral membrane.

NTD Antibodies that Mediate SARS-COV-2 Infection Enhancement In Vitro, do not Enhance Infection or Disease In Vivo in Monkeys

[0387] To determine the biological relevance of in vitro infection enhancement by NTD antibodies, we examined the effect of infusion of NTD antibody DH1052 on SARS-COV-2 infection in monkeys (57. 58). Cynomolgus macaques were infused with 10 mg of antibody per kilogram of body weight and then challenged intranasally and intratracheally with 105 plaque forming units of SARS-COV-2 three days later (FIG. 5G) (54). We compared the protective activity of in vitro infection-enhancing antibody DH1052, neutralizing NTD antibody DH1050.1, and negative control influenza antibody CH65 in separate groups of macaques. Overall, macaques that received CH65 and DH1052 had comparable lung inflammation four days after infection (FIG. 5H, FIGS. 34 and 35A). One macaque administered DH1052 showed increased perivascular mononuclear inflammation and perivascular/alveolar edema compared to control antibody-infused animals and compared to the other four animals in the DH1052-treated group (FIG. 35B). Macaques administered DH1050.1 had significantly lower lung inflammation than CH65-infused macaques (FIG. 5H, FIGS. 34 and 35A). Infusion of either neutralizing NTD DH1050.1 or in vitro infection-enhancing antibody DH1052 reduced viral nucleocapsid antigen in the lung (FIG. 51, FIGS. 34 and 35A), envelope (E) gene subgenomic RNA (sgRNA), and nucleocapsid (N) gene sgRNA in the bronchoalveolar fluid (BAL) compared to the same assays in animals treated with negative control antibody (FIGS. 5J-K, FIG. 36C). In nasal swab fluid, macaques showed reduced E and N gene sgRNA when DH1050.1 or DH1052 was infused respectively, with the reduction by DH1050.1 being statistically significant (FIGS. 5L-M, FIGS. 36A-B and 36D-E). Thus, neutralizing NTD antibody DH1050.1 provided protection against SARS-COV-2 infection in cynomolgus macaques while the in vitro infection-enhancing antibody DH1052 showed no infection enhancement but rather showed partial protection from SARS-COV-2 infection.

### In Vitro Infection-Enhancing RBD Antibodies Did not Enhance SARS-COV-2 Infection In Vivo in Nonhuman Primates

[0388] We assessed the in vivo relevance of RBD antibody infection enhancement in the cynomolgus macaque SARS-COV-2 intranasal/intratracheal challenge model. We examined in vivo infection enhancement by RBD antibodies DH1041. DH1043. DH1046, and DH1047 (FIG. 6E). All RBD antibodies that neutralized SARS-COV-2 pseudovirus and live virus assays and enhanced infection in vitro in TZM-bl-FcγRI or—FcγRII cells showed in vivo protection from SARS-COV-2 infection. In macaques administered RBD antibodies DH1041. DH1043, or DH1047, lung inflammation was reduced and lung viral antigen was undetectable in all but one macaque (FIG. 6F-G, FIGS. 34 and 35A). E gene sgRNA and N gene sgRNA were significantly reduced in the upper and lower respiratory tract based on analyses of bronchoalveolar lavage fluid, nasal swabs, and nasal wash samples (FIG. 6H-K, FIG. 36). Monkeys treated with RBD antibody DH1046 exhibited comparable levels of lung inflammation (FIG. 6F-G, FIGS. 34 and 35A) and about 1-log reduction in E gene and N gene sgRNA levels compared to negative control antibody-infused macaques (FIG. 6H-K, FIG. 36). These results further demonstrated that both FcγR-independent and FcγR-dependent in vitro SARS-COV-2 infection enhancement did not translate to SARS-COV-2 in vivo infection enhancement.

### DISCUSSION

[0389] Antibody enhancement of virus infection in vitro has been reported for MERS-COV and SARS-COV (24. 33. 38. 59) and is a question facing the safe administration of antibody prophylaxis, antibody therapy, and antibody-based COVID-19 vaccines (60-63). The effects of SARS-COV-2 antibodies have been further questioned since individuals who seroconverted earlier tend to have more severe COVID-19 disease than later seroconverters (64). Here, we demonstrated that SARS-COV-2 antibodies can mediate infection enhancement in vitro, but this in vitro phenotype does not translate to enhanced infection in non-human primate models of SARS-COV-2. We assessed in vivo infection enhancement as severe lung immunopathology or increased respiratory tract virus replication. Neither of these hallmarks of infection enhancement was significantly present in nonhuman primates administered RBD or NTD antibodies that mediate infection enhancement in vitro. Thus, the infection enhancing assays in either 293T cells or in TZM-bl-FcR-expressing cells did not predict in vivo antibody functions. These preclinical results indicate that SARS-COV-2 antibody treatments or the induction of SARS-COV-2 antibodies by vaccination have a low likelihood of exacerbating COVID-19 disease in humans.

[0390] Previous studies with polyclonal serum antibodies against SARS-COV have also shown in vitro FcγR-dependent infection enhancement, but no in vivo infection enhancement in hamsters (32). For the present study, there are two explanations for why there is a lack of congruence between in vitro infection enhancement assays and outcomes of passive antibody infusion/SARS-COV-2 challenge studies. First, macrophages and other phagocytes are the target cells that uptake MERS-COV when infection enhancement occurs (33. 65. 66). In contrast, SARS-COV and SARS-COV-2 do not productively infect macrophages (36. 39. 66). Thus, while RBD antibodies can be able to mediate FcγR-dependent virus uptake of SARS-CoV-2 in vitro, in vivo FcγR-dependent virus uptake of SARS-COV-2 may largely lead to abortive infection in macrophages (36. 67).

[0391] Second, in vivo SARS-COV-2 antibodies can have the ability to combat SARS-COV-2 replication through antibody effector functions. While circulating in vivo, antibodies can opsonize infected cells or virions and recruit effector immune cells to kill the virus or the infected cells through Fc-mediated mechanisms. A study in a SARS-COV-2 mouse model of acquisition indicated that Fc effector functions contribute to the protective activity of neutralizing antibodies C104, C002, and C110 (68). Thus, antibody effector functions can contribute to the outcome in vivo, but not be accounted for in SARS-COV-2 neutralization assays in vitro. In support of this, infection-enhancing, non-neutralizing NTD antibody DH1052 reduced infectious virus titers in the lung compared to the negative control antibody. The inability of DH1052 to neutralize in vitro indicates it reduced SARS-COV infection in vivo through FcγR-mediated, non-neutralizing effector functions.

[0392] We observed two different types of in vitro infection enhancement. First, RBD antibodies mediated classical antibody-dependent enhancement that required FcγRs for virus uptake (62). Previous studies have demonstrated that uptake of MERS-COV or SARS-COV has mostly been mediated by FcγRIIa on the surface of macrophages (33. 36. 39). In contrast to SARS-COV and MERS-COV infection enhancing antibodies, we identified SARS-COV-2 RBD antibodies utilized FcγRIIb or FcγRI. Thus, different FcγRs can mediate SARS-COV and MERS-COV in vitro infection enhancement compared to SARS-COV-2 in vitro infection enhancement. Second, non-neutralizing NTD antibodies mediated FcγR-independent infection enhancement in two different FcγR-negative, ACE-2-expressing cell types. The mechanism of this in vitro enhancement remains unclear, but can be of antibody modulation of S protein conformation. In NSEM studies, NTD antibodies bound to S in a 3-RBD-down conformation. Whether S protein has different entry kinetics or higher affinity for ACE-2 when liganded to infection-enhancing antibody DH1052 will be a focus of studies.

[0393] There are over 100 COVID-19 vaccine candidates under development aiming to halt the spread of SARS-COV-2 infection (69. 70), with three large efficacy trials underway in the United States (71). Many of these vaccine candidates induce SARS-COV-2 antibody responses (70. 72-77). It is important to note that administration of COVID-19 convalescent sera to over 35,000 COVID-19 patients have demonstrated the treatment to be safe and is not associated with enhanced disease (78). Our results indicate while SARS-COV-2 enhancement occurred in SARS-COV-2 infection assays in vitro, these assays did not indicate a risk of infection enhancement in mice or monkeys in vivo. The SARS-COV-2-infected individual from whom many of our antibodies were isolated did not progress to severe COVID-19 disease. However, antibody and vaccine treatments require proper safety evaluation in clinical trials, since antibody-dependent infection enhancement is not the only safety concern of such medical countermeasures. These results indicate that antibody-induced enhancement of infection will not be a biologically relevant adverse effect following COVID-19 vaccination in humans.

### REFERENCES CITED IN THIS EXAMPLE

[0394] 1. B. S. Graham, Rapid COVID-19 vaccine development. Science 368, 945-946 (2020).
[0395] 2. G. D. Sempowski, K. O. Saunders, P. Acharya, K. J. Wiehe, B. F. Haynes, Pandemic Preparedness: Developing Vaccines and Therapeutic Antibodies For COVID-19. Cell 181, 1458-1463 (2020).
[0396] 3. D. Corti, A. Lanzavecchia, Broadly neutralizing antiviral antibodies. Annu Rev Immunol 31, 705-742 (2013).
[0397] 4. M. B. Battles, J. S. Mclellan, Respiratory syncytial virus entry and how to block it. Nat Rev Microbiol 17, 233-245 (2019).
[0398] 5. A. Dashti, A. L. DeVico, G. K. Lewis, M. M. Sajadi, Broadly Neutralizing Antibodies against HIV: Back to Blood. Trends Mol Med 25, 228-240 (2019).
[0399] 6. L. Du, S. Jiang, Immunotherapy of SARS based on combinations of neutralizing human monoclonal antibodies. Future Virol 5, 141-144 (2010).
[0400] 7. S. Jiang, C. Hillyer, L. Du, Neutralizing Antibodies against SARS-COV-2 and Other Human Coronaviruses. Trends Immuno/41, 355-359 (2020).
[0401] 8. J. Xu et al., Antibodies and vaccines against Middle East respiratory syndrome coronavirus. Emerg Microbes Infect 8, 841-856 (2019).
[0402] 9. R. Shi et al., A human neutralizing antibody targets the receptor binding site of SARS-COV-2. Nature, (2020).
[0403] 10. A. O. Hassan et al., A SARS-COV-2 infection model in mice demonstrates protection by neutralizing antibodies. Cell, (2020).
[0404] 11. Y. Wu et al., A noncompeting pair of human neutralizing antibodies block COVID-19 virus binding to its receptor ACE2. Science, (2020).
[0405] 12. T. F. Rogers et al., Isolation of potent SARS-COV-2 neutralizing antibodies and protection from disease in a small animal model. Science, (2020).
[0406] 13. Y. Cao et al., Potent neutralizing antibodies against SARS-COV-2 identified by high-throughput single-cell sequencing of convalescent patients' B cells. Cell, (2020).
[0407] 14. X. Chen et al., Human monoclonal antibodies block the binding of SARS-COV-2 spike protein to angiotensin converting enzyme 2 receptor. Cell Mol Immunol 17, 647-649 (2020).
[0408] 15. B. Ju et al., Human neutralizing antibodies elicited by SARS-COV-2 infection. Nature, (2020).
[0409] 16. C. Wang et al., A human monoclonal antibody blocking SARS-COV-2 infection. Nat Commun 11, 2251 (2020).
[0410] 17. D. Wrapp et al., Structural Basis for Potent Neutralization of Betacoronaviruses by Single-Domain Camelid Antibodies. Cell 181, 1004-1015.e1015 (2020).
[0411] 18. S. J. Zost et al., Rapid isolation and profiling of a diverse panel of human monoclonal antibodies targeting the SARS-COV-2 spike protein, bioRxiv, (2020).
[0412] 19. P. J. M. Brouwer et al., Potent neutralizing antibodies from COVID-19 patients define multiple targets of vulnerability. Science, (2020).
[0413] 20. D. F. Robbiani et al., Convergent antibody responses to SARS-COV-2 in convalescent individuals. Nature, (2020).
[0414] 21. A. Baum et al., Antibody cocktail to SARS-COV-2 spike protein prevents rapid mutational escape seen with individual antibodies. Science, (2020).
[0415] 22. J. Hansen et al., Studies in humanized mice and convalescent humans yield a SARS-COV-2 antibody cocktail. Science, (2020).
[0416] 23. S. J. Zost et al., Potently neutralizing human antibodies that block SARS-COV-2 receptor binding and protect animals, bioRxiv, (2020).
[0417] 24. L. Liu et al., Potent neutralizing antibodies against multiple epitopes on SARS-CoV-2 spike. Nature 584, 450-456 (2020).
[0418] 25. D. Pinto et al., Cross-neutralization of SARS-COV-2 by a human monoclonal SARS-COV antibody. Nature 583, 290-295 (2020).
[0419] 26. X. Chi et al., A potent neutralizing human antibody reveals the N-terminal domain of the Spike protein of SARS-COV-2 as a site of vulnerability. (2020).
[0420] 27. A. Z. Wec et al., Broad neutralization of SARS-related viruses by human monoclonal antibodies. Science, (2020).
[0421] 28. A. M. Arvin et al., A perspective on potential antibody-dependent enhancement of SARS-COV-2. Nature 584, 353-363 (2020).
[0422] 29. A. Iwasaki, Y. Yang, The potential danger of suboptimal antibody responses in COVID-19. Nat Rev Immunol 20, 339-341 (2020).
[0423] 30. S. Ubol, S. B. Halstead, How innate immune mechanisms contribute to antibody-enhanced viral infections. Clin Vaccine Immunol 17, 1829-1835 (2010).
[0424] 31. M. Jaume et al., Anti-severe acute respiratory syndrome coronavirus spike antibodies trigger infection of human immune cells via a pH- and cysteine protease-independent FcgammaR pathway. J Virol 85, 10582-10597 (2011).
[0425] 32. Y. W. Kam et al., Antibodies against trimeric S glycoprotein protect hamsters against SARS-COV challenge despite their capacity to mediate FcgammaRII-dependent entry into B cells in vitro. Vaccine 25, 729-740 (2007).
[0426] 33. Y. Wan et al., Molecular Mechanism for Antibody-Dependent Enhancement of Coronavirus Entry. J Virol 94, (2020).
[0427] 34. S. F. Wang et al., Antibody-dependent SARS coronavirus infection is mediated by antibodies against spike proteins. Biochem Biophys Res Commun 451, 208-214 (2014).
[0428] 35. M. Yilla et al., SARS-coronavirus replication in human peripheral monocytes/macrophages. Virus Res 107, 93-101 (2005).
[0429] 36. M. S. Yip et al., Antibody-dependent enhancement of SARS coronavirus infection and its role in the pathogenesis of SARS. Hong Kong Med J 22, 25-31 (2016).
[0430] 37. M. S. Yip et al., Antibody-dependent infection of human macrophages by severe acute respiratory syndrome coronavirus. Virol J 11, 82 (2014).
[0431] 38. Q. Wang et al., Immunodominant SARS Coronavirus Epitopes in Humans Elicited both Enhancing and Neutralizing Effects on Infection in Non-human Primates. ACS Infect Dis 2, 361-376 (2016).
[0432] 39. S. Bournazos, A. Gupta, J. V. Ravetch, The role of IgG Fc receptors in antibody-dependent enhancement. Nat Rev Immunol 20, 633-643 (2020).
[0433] 40. H. X. Liao et al., High-throughput isolation of immunoglobulin genes from single human B cells and expression as monoclonal antibodies. J Virol Methods 158, 171-179 (2009).
[0434] 41. H. X. Liao et al., Co-evolution of a broadly neutralizing HIV-1 antibody and founder virus. Nature 496, 469-476 (2013).
[0435] 42. Y. J. Hou et al., SARS-COV-2 Reverse Genetics Reveals a Variable Infection Gradient in the Respiratory Tract. Cell 182, 429-446 e414 (2020).
[0436] 43. A. Takada, H. Ebihara, H. Feldmann, T. W. Geisbert, Y. Kawaoka, Epitopes required for antibody-dependent enhancement of Ebola virus infection. J Infect Dis 196 Suppl 2, S347-356 (2007).
[0437] 44. F. Wu et al., Antibody-dependent enhancement (ADE) of SARS-COV-2 infection in recovered COVID-19 patients: studies based on cellular and structural biology analysis, medRxiv, 2020.2010.2008.20209114 (2020).
[0438] 45. C. L. Hsieh et al., Structure-based design of prefusion-stabilized SARS-COV-2 spikes. Science 369, 1501-1505 (2020).
[0439] 46. Q. Wang et al., Structural and Functional Basis of SARS-COV-2 Entry by Using Human ACE2. Cell 181, 894-904 e899 (2020).
[0440] 47. B. Ju et al., Human neutralizing antibodies elicited by SARS-COV-2 infection. Nature 584, 115-+ (2020).
[0441] 48. J. Huo et al., Neutralizing nanobodies bind SARS-COV-2 spike RBD and block interaction with ACE2. Nat Struct Mol Biol 27, 846-854 (2020).
[0442] 49. D. Zhou et al., Structural basis for the neutralization of SARS-COV-2 by an antibody from a convalescent patient. Nat Struct Mol Biol 27, 950-958 (2020).
[0443] 50. J. E. Pak et al., Structural insights into immune recognition of the severe acute respiratory syndrome coronavirus S protein receptor binding domain. J Mol Biol 388, 815-823 (2009).
[0444] 51. D. Wrapp et al., Cryo-EM structure of the 2019-nCOV spike in the prefusion conformation. Science 367, 1260-1263 (2020).
[0445] 52. R. Henderson et al., Controlling the SARS-COV-2 spike glycoprotein conformation. Nat Struct Mol Biol 27, 925-933 (2020).
[0446] 53. A. C. Walls et al., Structure, Function, and Antigenicity of the SARS-COV-2 Spike Glycoprotein. Cell 181, 281-292 e286 (2020).
[0447] 54. J. Lan et al., Structure of the SARS-COV-2 spike receptor-binding domain bound to the ACE2 receptor. Nature 581, 215-220 (2020).
[0448] 55. A. S. Dingens et al., Complete functional mapping of infection- and vaccine-elicited antibodies against the fusion peptide of HIV. PLOS Pathog 14, e1007159 (2018).
[0449] 56. K. Xu et al., Epitope-based vaccine design yields fusion peptide-directed antibodies that neutralize diverse strains of HIV-1. Nat Med 24, 857-867 (2018).
[0450] 57. B. Rockx et al., Comparative pathogenesis of COVID-19, MERS, and SARS in a nonhuman primate model. Science 368, 1012-1015 (2020).
[0451] 58. S. R. Leist, A. Schafer, D. R. Martinez, Cell and animal models of SARS-COV-2 pathogenesis and immunity. Dis Model Mech 13, (2020).
[0452] 59. J. Gu et al., Multiple organ infection and the pathogenesis of SARS. J Exp Med 202, 415-424 (2005).
[0453] 60. S. B. Halstead, L. Katzelnick, COVID 19 Vaccines: Can we fear ADE? J Infect Dis, (2020).
[0454] 61. K. Karthik, T. M. A. Senthilkumar, S. Udhayavel, G. D. Raj, Role of antibody-dependent enhancement (ADE) in the virulence of SARS-COV-2 and its mitigation strategies for the development of vaccines and immunotherapies to counter COVID-19. Hum Vaccin Immunother, 1-6 (2020).
[0455] 62. W. S. Lee, A. K. Wheatley, S. J. Kent, B. J. DeKosky, Antibody-dependent enhancement and SARS-COV-2 vaccines and therapies. Nat Microbiol 5, 1185-1191 (2020).
[0456] 63. H. Ulrich, M. M. Pillat, A. Tarnok, Dengue Fever, COVID-19 (SARS-COV-2), and Antibody-Dependent Enhancement (ADE): A Perspective. Cytometry A 97, 662-667 (2020).
[0457] 64. M. S. Ho et al., Neutralizing antibody response and SARS severity. Emerg Infect Dis 11, 1730-1737 (2005).
[0458] 65. J. Zhou et al., Active replication of Middle East respiratory syndrome coronavirus and aberrant induction of inflammatory cytokines and chemokines in human macrophages: implications for pathogenesis. J Infect Dis 209, 1331-1342 (2014).
[0459] 66. K. P. Y. Hui et al., Tropism, replication competence, and innate immune responses of the coronavirus SARS-COV-2 in human respiratory tract and conjunctiva: an analysis in ex-vivo and in-vitro cultures. Lancet Respir Med 8, 687-695 (2020).
[0460] 67. C. Y. Cheung et al., Cytokine responses in severe acute respiratory syndrome coronavirus-infected macrophages in vitro: possible relevance to pathogenesis. J Virol 79, 7819-7826 (2005).
[0461] 68. A. Schafer et al., Antibody potency, effector function and combinations in protection from SARS-COV-2 infection in vivo, bioRxiv, (2020).
[0462] 69. G. Dagotto, J. Yu, D. H. Barouch, Approaches and Challenges in SARS-COV-2 Vaccine Development. Cell Host Microbe 28, 364-370 (2020).
[0463] 70. J. Wang, Y. Peng, H. Xu, Z. Cui, R. O. Williams, 3rd, The COVID-19 Vaccine Race: Challenges and Opportunities in Vaccine Formulation. AAPS PharmSciTech 21, 225 (2020).
[0464] 71. B. F. Haynes et al., Prospects for a safe COVID-19 vaccine. Sci Transl Med, (2020).
[0465] 72. E. J. Anderson et al., Safety and Immunogenicity of SARS-COV-2 mRNA-1273 Vaccine in Older Adults. N Engl J Med, (2020).
[0466] 73. K. S. Corbett et al., SARS-COV-2 mRNA vaccine design enabled by prototype pathogen preparedness. Nature 586, 567-571 (2020).
[0467] 74. K. S. Corbett et al., Evaluation of the mRNA-1273 Vaccine against SARS-CoV-2 in Nonhuman Primates. N Engl J Med 383, 1544-1555 (2020).
[0468] 75. L. A. Jackson et al., An mRNA Vaccine against SARS-COV-2-Preliminary Report. N Engl J Med, (2020).
[0469] 76. P. M. Folegatti et al., Safety and immunogenicity of the ChAd0×1 nCOV-19 vaccine against SARS-COV-2: a preliminary report of a phase ½, single-blind, randomised controlled trial. Lancet 396, 467-478 (2020).
[0470] 77. M. J. Mulligan et al., Phase I/II study of COVID-19 RNA vaccine BNT162b1 in adults. Nature 586, 589-593 (2020).
[0471] 78. M. J. Joyner et al., Effect of Convalescent Plasma on Mortality among Hospitalized Patients with COVID-19: Initial Three-Month Experience, medRxiv, 2020.2008.2012.20169359 (2020).

### Materials and Methods

### Human Subjects

[0472] Nasopharyngeal swabs and peripheral blood samples were collected from a convalescent COVID-19 donor (MESSI ID #450905) on designated days after reported onset of COVID symptoms. The SARS-COV-1 donor PBMC were provided by NIH/VRC. Human subject specimens were collected and used with the informed consent of study participants and in compliance with the Duke University Medical Center Institutional Review Board (DUHS IRB Pro00100241).

### Symptom Data Collections

[0473] Participant self-reported symptoms were recorded at each time-point for 39 symptom categories (nasal discharge, nasal congestion, sneezing, coughing, shortness of breath, malaise, throat discomfort, fever, headache, shaking chills, loss of smell, loss of taste, excessive sweating, dizziness, pain behind the eyes, itchy/watery eyes, visual blurring, hearing problems, ear pain, confusion, stiff neck, swollen glands, palpitations, chest pain, pain in joints, muscle soreness, fatigue, loss of appetite, abdominal pain, nausea/vomiting, diarrhea, swelling, itchy skin, rash, skin lesions, unusual bleeding, red fingers or toes, red eyes, other: specify). Each symptom was scored on a scale of 0-4, with 0) indicating not present, 1 mild, 2 moderate, 3 severe, and 4 very severe symptoms. Daily symptom count (number of non-zero symptom categories) and symptom severity (sum of all symptom scores) were determined for each survey timepoint. At enrollment, date of symptom onset was determined, and an initial “historical” symptom survey recorded maximum score for each symptom category between symptom onset and study enrollment.

### Expression of Recombinant Viral Proteins

[0474] The SARS-COV-2 ectodomain constructs were produce and purified as describe previously (Wrapp, D. et al. 2020). Plasmids encoding Spike-2P and HexaPro (1) were transiently transfected in FreeStyle 293 cells (Thermo Fisher) using Turbo293 (SpeedBiosystems). The cultures were collected on Day 6 post transfection. The cells were separated from the medium by centrifugation. Protein were purified from filtered cell supernatants by StrepTactin resin (IBA) and additionally by size exclusive chromatography using Superose 6 10/300 increase column (GE Healthcare) in 2 mM Tris pH 8, 200mMnNaCl, 0).02% NaN3. SARS-COV-2 NTD was produced as previously described (2). SARS-COV-1 RBD and MERS-COV Spike RBD were cloned into pVRC vector for mammalian expression (FreeStyle 293F or Expi293F suspension cells). The construct contains an HRV 3C-cleavable C-terminal SBP-8xHis tag. Supernatants were harvested 5 days post-transfection and passaged directly over Cobalt-TALON resin (Takara) followed by size exclusion chromatography on Superdex 200 Increase (GE Healthcare) in 1× PBS. Yields from FreeStyle 293F cells can be approximately 50 mg/liter culture. Affinity tags can be removed using HRV 3C protease (ThermoScientific) and the protein repurified using Cobalt-TALON resin to remove the protease, tag and non-cleaved protein.

### Antigen-Specific Single B Cell Sorting

[0475] Plasmablasts were sorted by flow cytometry from the SARS-COV-2 donor on Day 11 and Day 15 post symptom onset. PBMCs were stained with optimal concentrations of the following fluorochrome-antibody conjugates: IgD PE (Clone #IA6-2, BD Biosciences, Catalog #555779), CD3 PE-Cy5 (Clone #HIT3a, BD Biosciences, Catalog #555341), CD10 PE-CF594 (Clone #HI10A, BD Biosciences, Catalog #562396), CD27 PE-Cy7 (Clone #0323, eBioscience, Catalog #25-0279), CD38 APC-Alexa Fluor (AF) 700 (Clone #LS198-4-2, Beckman Coulter, Catalog #B23489), CD19 APC-Cy7 (Clone #LJ25C1, BD Biosciences, Catalog #561743), CD16 BV570) (Clone #3G8, Biolegend, Catalog #302035), CD14 BV605 (Clone #M5E2, Biolegend, Catalog #301834), and CD20 BV650 (Clone #2H7, BD, Catalog #563780). The cells were then labeled with Fixable Aqua Live/Dead Cell Stain Kit (Invitrogen. Catalog #L34957). On a BD FACSAria II flow cytometer (BD Biosciences), plasmablasts were identified as viable CD14/CD16/CD19+/CD2010W/IgD/CD27^{high}/CD38^{high} cells and sorted as single cells into 96-well plates containing lysis buffer. Sorted plates were frozen at −80° C., in the DHVI Flow Facility under BSL3 precautions in the Duke Regional Biocontainment Laboratory (Durham. NC) until processing.

[0476] Antigen-specific memory B cells (MBCs) were isolated by flow cytometric sorting from the SARS-COV-2 donor on Day 36 post symptom onset, and a donor with SARS-COV-1 history. PBMCs were stained with IgD FITC (Clone #IA6-2. BD Biosciences. Catalog #555778). IgM PerCp-Cy5.5 (Clone #G20-127. BD Biosciences. Catalog #561285). CD10 PE-CF594 (Clone #HI10A. BD Biosciences. Catalog #562396). CD3 PE-Cy5 (Clone #HIT3a. BD Biosciences. Catalog #555341). CD235a PE-Cy5 (Clone #GA-R2. BD Biosciences, Catalog #559944). CD27 PE-Cy7 (Clone #0323, eBioscience. Catalog #25-0279). CD38 APC-AF700) (Clone #LS198-4-2. Beckman Coulter. Catalog #B23489). CD19 APC-Cy7 (Clone #LJ25C1. BD Biosciences. Catalog #561743), CD14 BV605 (Clone #M5E2. Biolegend. Catalog #301834). CD16 BV570 (Clone #3G8. Biolegend. Catalog #302035), and fluorescent-labeled SARS-COV-2 Spike probes (AF647-conjugated Spike-2P. PE-conjugated Spike-2P. AF647-conjugated NTD. AF647-conjugated RBD. VioBright 515-conjugated RBD). The cells were then labeled with Fixable Aqua Live/Dead Cell Stain Kit (Invitrogen. Catalog #L34957). On a BD FACSAria II flow cytometer (BD Biosciences), antigen-specific MBCs were identified as viable CD3/CD14/CD16/CD235a/CD19⁺/IgD/probe⁺ cells and were sorted as single cells into 96-well plates containing lysis buffer. Collection plates were immediately frozen in a dry ice/ethanol bath, and stored at −80° C., in the DHVI Flow Facility under BSL3 precautions in the Duke Regional Biocontiamet Laboratory until processing. Flow cytometric data were analyzed using FlowJo version 10.

### PCR Amplification of Human Antibody Genes

[0477] Antibody genes were amplified by RT-PCR from flow cytometry-sorted single B cells using the methods as described previously (3. 4) with modification. The PCR-amplified genes were then purified and sequenced with 10 μM forward and reverse primers. Sequences were analyzed by using the human library in Clonalyst for the VDJ arrangements of the immunoglobulin IGHV. IGKV, and IGLV sequences and mutation frequencies (5). Clonal relatedness of V_{H}D_{H}J_{H} and V_{L}J_{L} sequences was determined as previously described (6).

Expression of Antibody Viable Region Genes as Full-Length IgG Recombinant mAbs

[0478] Transient transfection of recombinant antibodies was performed as previously described (4). Briefly, purified PCR products were used for overlapping PCR to generate linear human IgG expression cassettes. The expression cassettes were transfected into 293i cells using ExpiFectamine (Thermo Fisher Scientific. Catalog #A14525). The supernatant samples containing recombinant IgGs were used for IgG quantification and preliminary ELISA binding screening.

[0479] The down-selected human antibody genes were then synthesized and cloned (GenScript) in a human IgG1 backbone with 4A mutations to enhance antibody-dependent cell-mediated cytotoxicity (ADCC) or a human IgG1 backbone with a LS mutation to extent antibody half-life (7). Recombinant IgG antibodies were then produced in HEK293i suspension cells by transfection with ExpiFectamine and purified using Protein A resin. The purified IgG antibodies were run in SDS-PAGE for Coomassie blue staining and western blot for quality control and then used for the downstream experiments.

### Antibody Binding ELISA

[0480] For ELISA binding assays of Coronavirus Spike antibodies, the antigen panel included SARS-COV-2 Spike S1+S2 ectodomain (ECD) (SINO. Catalog #40589-V08B1). SARS-COV-2 Spike-2P (8). SARS-COV-2 Spike S2 ECD (SINO. Catalog #40590-V08B). SARS-COV-2 Spike RBD from insect cell sf9) (SINO. Catalog #40592-V08B). SARS-COV-2 Spike RBD from mammalian cell 293 (SINO. Catalog #40592-V08H). SARS-COV-2 Spike NTD-Biotin. SARS-COV Spike Protein Delta™ (BEI. Catalog #NR-722). SARS-COV WH20 Spike RBD (SINO. Catalog #40150-V08B2). SARS-COV WH20 Spike SI (SINO, Catalog #40150-V08B1). SARS-COV-1 RBD. MERS-COV Spike S1+S2 (SINO. Catalog #40069-V08B). MERS-COV Spike SI (SINO. Catalog #40069-V08B1). MERS-COV Spike S2 (SINO. Catalog #40070-V08B). MERS-COV Spike RBD (SINO. Catalog #40071-V08B1), MERS-COV Spike RBD. In preliminary ELISA screening of the transient transfection supernatants, we also screened the antibodies against SARS-COV CL Protease protein (BEI. Catalog #30105) and SARS-COV Membrane (M) protein (BEI. Catalog #110705).

[0481] For binding ELISA. 384-well ELISA plates were coated with 2 μg/mL of antigens in 0.1 M sodium bicarbonate overnight at 4° C. Plates were washed with PBS+0.05% Tween 20 and blocked with blocked with assay diluent (PBS containing 4% (w/v) whey protein. 15% Normal Goat Serum. 0.5% Tween-20, and 0.05% Sodium Azide) at room temperature for 1 hour. Purified MAb samples in 3-fold serial dilutions in assay diluent starting at 100 μg/mL, or un-diluted transfection supernatant were added and incubated for 1 hour, followed by washing with PBS-0.1% Tween 20. HRP-conjugated goat anti-human IgG secondary Ab (SouthernBiotech, catalog #2040-05) was diluted to 1:10.000 and incubated at room temperature for 1 hour. These plates were washed four times and developed with tetramethylbenzidine substrate (SureBlue Reserve-KPL). The reaction was stopped with 1 M HCl, and optical density at 450 nm (OD450) was determined.

### Affinity Measurements

[0482] SPR measurements of SARS-COV-2 antibody Fab binding to Spike-2P or Spike-Hexaro proteins were performed using a Biacore S200 instrument (Cytiva, formerly GE Healthcare. DHVI BIA Core Facility. Durham. NC) in HBS-EP+1× running buffer. The Spike proteins were first captured onto a Series S Streptavidin chip to a level of 300-400 RU for Spike-2P and 350-450) resonance units (RU) for Spike-HexaPro. The antibody Fabs were injected at 0.5 to 500 nM over the captured S proteins using the single cycle kinetics injection mode at a flow rate of 50 uL/min. Association phase was maintained with either 120 or 240 second injections of each Fab at increasing concentrations followed by a dissociation of 600 seconds after the final injection. After dissociation, the S proteins were regenerated from the streptavidin surface using a 30 second pulse of Glycine pH1.5. Results were analyzed using the Biacore S200 Evaluation software (Cytiva). A blank streptavidin surface along with blank buffer binding were used for double reference subtraction to account for non-specific protein binding and signal drift. Subsequent curve fitting analyses were performed using a 1:1 Langmuir model with a local Rmax for the Fabs with the exception of DH1050.1 Fab which was fit using the heterogeneous ligand model with local Rmax. The reported binding curves are representative of two data sets.

### Surface Plasmon Resonance Antibody Blocking Assay

[0483] RBD and NTD Abs binding to S protein was measured by surface plasmon resonance (BIAcore 3000; Cytiva, formerly GE Healthcare. DHVI BIA Core Facility. Durham, NC) analysis. Antibody binding competition and blocking were measured by SPR following immobilization by amine coupling of monoclonal antibodies to CM5 sensor chips (BIAcore/Cytiva). Antibody competition experiments were performed by mixing S protein and mAb (30 minutes incubation) followed by injection for 5 minutes at 50 uL/min. In separate assays and from analysis of binding to an identical epitope binding ligand, it was determined that S protein at 20 μm and antibody at 200 μm bind to complete saturation. Antibody blocking assays were performed by co-injecting S protein (20 μM) over mAb immobilized surfaces for 3 minutes at 30 μL/min and a test Ab (200 μM) for 3 minutes at 30 uL/min. The dissociation of the antibody sandwich complex with the spike protein was monitored for 10 minutes with buffer flow and then a 24 second injection of Glycine pH2.0 for regeneration. Blank buffer binding was used for subtraction to account for signal drift. Data analyses were performed with BIA-evaluation 4.1 software (BIAcore/Cytiva).

[0484] ACE2-blocking assay

[0485] For ACE-2 blocking assays, plates were coated as stated herein with 2 μg/mL recombinant ACE-2 protein, then washed and blocked with 3% BSA in 1×PBS. While assay plates blocked, purified antibodies were diluted as stated herein, only in 1% BSA with 0.05% Tween-20. In a separate dilution plate Spike-2P protein was mixed with the antibodies at a final concentration equal to the EC50 at which spike binds to ACE-2 protein. The mixture was allowed to incubate at room temperature for 1 hour. Blocked assay plates were then washed and the antibody-spike mixture was added to the assay plates for a period of 1 hour at room temperature. Plates were washed and a polyclonal rabbit serum against the same spike protein (nCOV-1 nCOV-2P.293F) was added for 1 hour, washed and detected with goat anti rabbit-HRP (Abcam cat #ab97080) followed by TMB substrate. The extent to which antibodies were able to block the binding spike protein to ACE-2 was determined by comparing the OD of antibody samples at 450 nm to the OD of samples containing spike protein only with no antibody. The following formula was used to calculate percent blocking: blocking %=(100-(OD sample/OD of spike only)*100).

### Negative-Stain Electron Microscopy

[0486] For each Fab-spike complex, an aliquot of spike protein at ˜1-5 mg/ml concentration that had been flash frozen and stored at −80° C., was thawed in an aluminum block at 37° C., for 5 minutes: then 1-4 μl of spike was mixed with sufficient Fab to give a 9:1 molar ratio of Fab to spike and incubated for 1 hour at 37° C. The complex was then cross-linked by diluting to a final spike concentration of 0).1 mg/ml into room-temperature buffer containing 150 mM NaCl, 20 mM HEPES pH 7.4, 5% glycerol, and 7.5 mM glutaraldehyde. After 5 minutes cross-linking, excess glutaraldehyde was quenched by adding sufficient 1 M Tris pH 7.4 stock to give a final concentration of 75 mM Tris and incubated for 5 minutes. For negative stain, carbon-coated grids (EMS, CF300-cu-UL) were glow-discharged for 20s at 15 mA, after which a 5-μl drop of quenched sample was incubated on the grid for 10-15 s, blotted, and then stained with 2% uranyl formate. After air drying grids were imaged with a Philips EM420 electron microscope operated at 120 kV, at 82.000× magnification and images captured with a 2k×2k CCD camera at a pixel size of 4.02 Å.

### Image Processing of Negative Stain Images

[0487] The RELION 3.0 program was used for all negative stain image processing. Images were imported, CTF-corrected with CTFFIND, and particles were picked using a spike template from previous 2D class averages of spike alone. Extracted particle stacks were subjected to 2-3 rounds of 2D class averaging and selection to discard junk particles and background picks. Cleaned particle stacks were then subjected to 3D classification using a starting model created from a bare spike model. PDB 6vsb, low-pass filtered to 30 Å. Classes that showed clearly-defined Fabs were selected for final refinements followed by automatic filtering and B-factor sharpening with the default Relion post-processing parameters.

### Cryo-EM Sample Preparation, Data Collection and Processing

[0488] To prepare antibody-bound complexes of the SARS-COV-2 2P spike, the spike at a final concentration of 1-2 mg/mL, in a buffer containing 2 mM Tris pH 8.0. 200 mM NaCl and 0).02% NaN3, was incubated with 5-6 fold molar excess of the antibody Fab fragments for 30-60 min. 2.5 uL of protein was deposited on a Quantifoil-1.2/1.3 holey carbon grid that had been glow discharged for 15s in a PELCO easiGlow™ Glow Discharge Cleaning System. After a 30 s incubation in >95% humidity, excess protein was blotted away for 2.5 seconds before being plunge frozen into liquid ethane using a Leica EM GP2 plunge freezer (Leica Microsystems). Cryo-EM data were collected on a Titan Krios (Thermo Fisher) equipped with a K3 detector (Gatan). Data were acquired using the Leginon system (9). All the datasets were energy filtered through a either a 20 eV or 30 eV slit. The dose was fractionated over 50 raw frames and collected at 50 ms framerate. Individual frames were aligned and dose-weighted (10). CTF estimation, particle picking. 2D classifications, ab initio model generation, heterogeneous refinements, homogeneous 3D refinements and local resolution calculations were carried out in cryoSPARC (11).

### Cryo-EM Structure Fitting and Analysis

[0489] Previously published SARS-COV-2 ectodomain structures of the all ‘down’ state (PDB ID 6VXX) and single RBD ‘up’ state (PDB ID 6VYB), and models of 2-RBD-up and 3-RBD-up states derived from these, were used to fit the cryo-EM maps in Chimera (12). Models of Fabs were generated in SWIS-MODEL and docked into the cryo-EM reconstructions using Chimera. Mutations were made in Coot (13). Coordinates were fit to the maps first using ISOLDE (14) followed by iterative refinement using Phenix (15) real space refinement and subsequent manual coordinate fitting in Coot as needed. Structure and map analysis were performed using PyMol (16). Chimera (12) and ChimeraX (17).

### Live SARS-COV-2 Neutralization Assays

[0490] The SARS-COV-2 virus (Isolate USA-WA1/2020. NR-52281) was deposited by the Centers for Disease Control and Prevention and obtained through BEI Resources. NIAID. NIH. SARS-COV-2 Micro-neutralization (MN) assays were adapted from a previous study (18). In short, sera or purified antibodies are diluted two-fold and incubated with 100 TCID₅₀ virus for 1 hour. These dilutions are used as the input material for a TCID₅₀. Each batch of MN includes a known neutralizing control antibody (Clone D001: SINO. CAT #40150-D001). Data are reported as the last concentration at which a test sample protects Vero E6 cells.

[0491] SARS-COV-2 Plaque Reduction Neutralization Test (PRNT) were performed in the Duke Regional Biocontainment Laboratory BSL3 (Durham. NC) as previously described with virus-specific modifications (18). Two-fold dilutions of a test sample (e.g, serum, plasma. purified Ab) were incubated with 50 PFU SARS-COV-2 virus (Isolate USA-WA1/2020. NR-52281) for 1 hour. The antibody/virus mixture is used to inoculate Vero E6 cells in a standard plaque assay (19. 20). Briefly, infected cultures are incubated at 37° C. 5% CO₂ for 1 hour. At the end of the incubation. 1 mL of a viscous overlay (1:1 2× DMEM and 1.2% methylcellulose) is added to each well. Plates are incubated for 4 days. After fixation, staining and washing, plates are dried and plaques from each dilution of each sample are counted. Data are reported as the concentration at which 50% of input virus is neutralized. A known neutralizing control antibody is included in each batch run (Clone D001: SINO. CAT #40150-D001). GraphPad Prism was used to determine IC/EC50 values.

### Pseudo-Typed SARS-COV-2 Neutralization Assay and Infection-Enhancing Assays

[0492] Neutralization of SARS-COV-2 Spike-pseudotyped virus was performed by adopting an infection assay described previously (22) with lentiviral vectors and infection in either 293T/ACE2.MF (the cell line was kindly provided by Drs. Mike Farzan and Huihui Mu at Scripps). Cells were maintained in DMEM containing 10% FBS and 50 μg/ml gentamicin. An expression plasmid encoding codon-optimized full-length spike of the Wuhan-1 strain (VRC7480), was provided by Drs. Barney Graham and Kizzmekia Corbett at the Vaccine Research Center. National Institutes of Health (USA). The D614G mutation was introduced into VRC7480 by site-directed mutagenesis using the QuikChange Lightning Site-Directed Mutagenesis Kit from Agilent Technologies (Catalog #210518). The mutation was confirmed by full-length spike gene sequencing. Pseudovirions were produced in HEK 293T/17 cells (ATCC cat, no. CRL-11268) by transfection using Fugene 6 (Promega. Catalog #E2692). Pseudovirions for 293T/ACE2 infection were produced by co-transfection with a lentiviral backbone (pCMV AR8.2) and firefly luciferase reporter gene (pHR′ CMV Luc) (23). Culture supernatants from transfections were clarified of cells by low-speed centrifugation and filtration (0.45 μm filter) and stored in 1 ml aliquots at −80° C.

[0493] For 293T/ACE2 neutralization assays, a pre-titrated dose of virus was incubated with 8 serial 3-fold or 5-fold dilutions of mAbs in duplicate in a total volume of 150 μl for 1 hr at 37° C., in 96-well flat-bottom poly-L-lysine-coated culture plates (Corning Biocoat). Cells were suspended using TrypLE express enzyme solution (Thermo Fisher Scientific) and immediately added to all wells (10,000 cells in 100 μL of growth medium per well). One set of 8 control wells received cells+virus (virus control) and another set of 8 wells received cells only (background control). After 66-72 hrs of incubation, medium was removed by gentle aspiration and 30 μL of Promega 1× lysis buffer was added to all wells. After a 10 minute incubation at room temperature, 100 μl of Bright-Glo luciferase reagent was added to all wells. After 1-2 minutes, 110 μl of the cell lysate was transferred to a black/white plate (Perkin-Elmer). Luminescence was measured using a PerkinElmer Life Sciences, Model Victor2 luminometer. Neutralization titers are the mAb concentration (IC50/IC80) at which relative luminescence units (RLU) were reduced by 50% and 80% compared to virus control wells after subtraction of background RLUs. Negative neutralization values are indicative of infection-enhancement. Maximum percent inhibition (MPI) is the reduction in RLU at the highest mAb concentration tested.

[0494] For the TZM-bl neutralization assays, a pre-titrated dose of virus was incubated with serial 3-fold dilutions of test sample in duplicate in a total volume of 150 μl for 1 hr at 37° C., in 96-well flat-bottom culture plates. Freshly trypsinized cells (10,000 cells in 100 μl of growth medium containing 75 μg/ml DEAE dextran) were added to each well. One set of control wells received cells+virus (virus control) and another set received cells only (background control). After 68-72 hours of incubation, 150 μl of cultured medium was removed from each well, and 100 μl of Britelite Luminescence Reporter Gene Assay System (PerkinElmer Life Sciences) were added and plates incubated for 2 min at room temperature. After this period 150 μl of the lysate were transferred to black solid plates (Costar) for measurements of luminescence in a Perking Elmer instrument. Neutralization titers are the serum dilution at which relative luminescence units (RLU) were reduced by 50% and 80% compared to virus control wells after subtraction of background RLUs. MPI is the reduction in RLU at the highest mAb concentration tested. Infection-enhancing assays were performed with the same format but using TZM-bl cell lines stably expressing each of the four human FcγR receptors (24). In this assay an increase in RLUs over the virus control signal represents FcR-mediated entry.

### Non-Human Primate Protection Study

[0495] Groups of five cynomolgus macaques (4-8 kg) were given intravenous infusion with antibodies at 10 mg/kg body weight on Day-3, relative to infectious virus challenge. For each animal, 105 PFU (˜106 TCID₅₀) SARS-COV-2 virus (Isolate USA-WA1/2020) were diluted in 4 mL, and were given by I mL intranasally and 3 mL intratracheally on Day 0. Plasma and serum samples were collected on Day 0. Nasal swabs, nasal washes, and bronchoalveolar lavage (BAL) were collected on Day-5, 2, and 4.

### Histopathology

[0496] Lung specimen from nonhuman primates were fixed in 10% neutral buffered formalin, processed, and blocked in paraffin for histological analysis. All samples were sectioned at 5 μm and stained with hematoxylin-eosin (H&E) for routine histopathology. Samples were evaluated by a board-certified veterinary pathologist in a blinded manner. Sections were examined under light microscopy using an Olympus BX51 microscope and photographs were taken using an Olympus DP73 camera.

### Immunohistochemistry (IHC)

[0497] Staining for SARS-COV-2 antigen was achieved on the Bond RX automated system with the Polymer Define Detection System (Leica) used per manufacturer's protocol. Tissue sections were dewaxed with Bond Dewaxing Solution (Leica) at 72° C., for 30 min then subsequently rehydrated with graded alcohol washes and Ix Immuno Wash (StatLab). Heat-induced epitope retrieval (HIER) was performed using Epitope Retrieval Solution 1 (Leica), heated to 100° C., for 20 minutes. A peroxide block (Leica) was applied for 5 min to quench endogenous peroxidase activity prior to applying the SARS-COV-2 antibody (1:2000, GeneTex, GTX135357). Antibodies were diluted in Background Reducing Antibody Diluent (Agilent). The tissue was subsequently incubated with an anti-rabbit HRP polymer (Leica) and colorized with 3,3′-Diaminobenzidine (DAB) chromogen for 10 min. Slides were counterstained with hematoxylin.

### Viral RNA Extraction and Quantification

[0498] The assay for SARS-COV-2 quantitative Polymerase Chain Reaction (qPCR) detects total RNA using the WHO primer/probe set E_Sarbeco (Charité/Berlin). A QIAsymphony SP (Qiagen, Hilden, Germany) automated sample preparation platform along with a virus/pathogen DSP midi kit and the complex800 protocol were used to extract viral RNA from 800 μL of pooled samples. A reverse primer specific to the envelope gene of SARS-COV-2 (5′-ATA TTG CAG CAG TAC GCA CAC A-3′) was annealed to the extracted RNA and then reverse transcribed into cDNA using SuperScript™ III Reverse Transcriptase (Thermo Fisher Scientific, Waltham, MA) along with RNAse Out (Thermo Fisher Scientific, Waltham, MA). The resulting cDNA was treated with RNase H (Thermo Fisher Scientific, Waltham, MA) and then added to a custom 4× TaqMan™ Gene Expression Master Mix (Thermo Fisher Scientific, Waltham, MA) containing primers and a fluorescently labeled hydrolysis probe specific for the envelope gene of SARS-COV-2 (forward primer 5′-ACA GGT ACG TTA ATA GTT AAT AGC GT-3′, reverse primer 5′-ATA TTG CAG CAG TAC GCA CAC A-3′, probe 5′-6FAM/AC ACT AGC C/ZEN/A TCC TTA CTG CGC TTC G/IABKFQ-3′). The qPCR was carried out on a QuantStudio 3 Real-Time PCR System (Thermo Fisher Scientific, Waltham, MA) using the following thermal cycler parameters: heat to 50° C., hold for 2 min, heat to 95° C., hold for 10 min, then the following parameters are repeated for 50 cycles: heat to 95° C., hold for 15 seconds, cool to 60° C., and hold for 1 minute. SARS-COV-2 RNA copies per reaction were interpolated using quantification cycle data and a serial dilution of a highly characterized custom DNA plasmid containing the SARS-COV-2 envelope gene sequence. Mean RNA copies per milliliter were then calculated by applying the assay dilution factor (DF=11.7). The limit of quantification (LOQ) for this assay is approximately 62 RNA copies per milliliter of sample.

Subgenomic mRNA Assay

[0499] SARS-COV-2 E gene and N gene subgenomic mRNA (sgmRNA) was measured by a one-step RT-qPCR adapted from previously described methods (30. 31). To generate standard curves, a SARS-COV-2 E gene sgmRNA sequence, including the 5′UTR leader sequence, transcriptional regulatory sequence (TRS), and the first 228 bp of E gene, was cloned into a pcDNA3.1 plasmid. For generating SARS-COV-2 N gene sgmRNA, the E gene was replaced with the first 227 bp of N gene. The recombinant pcDNA3. 1 plasmids were linearized, transcribed using MEGAscript T7 Transcription Kit (ThermoFisher, Catalog #AM1334), and purified with MEGAclear Transcription Clean-Up Kit (ThermoFisher, Catalog #AM1908). The purified RNA products were quantified on Nanodrop, serial diluted, and aliquoted as E sgmRNA or N sgmRNA standards.

[0500] RNA extracted from animal samples or standards were then measured in Taqman custom gene expression assays (ThermoFisher Scientific). For these assays we used TaqMan Fast Virus 1-Step Master Mix (ThermoFisher, catalog #4444432) and custom primers/probes targeting the E gene sgmRNA (forward primer: 5′ CGATCTCTTGTAGATCTGTTCTCE 3″: reverse primer: 5′ ATATTGCAGCAGT ACGCACACA 3″: probe: 5′ FAM-ACACTAGCCATCCTTACTGCGCTTCG-BHQ1 3′) or the N gene sgmRNA (forward primer: 5° C. GATCTCTTGTAGATCTGTTCTC 3″: reverse primer: 5′ GGTGAA CCAAGACGCAGTAT 3″: probe: 5′ FAM-TAACCAGAATGGAGAACGCAGTG GG-BHQ1 3′). RT-Qpcr reactions were carried out on a QuantStudio 3 Real-Time PCR System (Applied Biosystems) or a StepOnePlus Real-Time PCR System (Applied Biosystems) using a program herein: reverse transcription at 50° C., for 5 minutes, initial denaturation at 95° C., for 20 seconds, then 40 cycles of denaturation-annealing-extension at 95° C., for 15 seconds and 60° C. for 30 seconds. Standard curves were used to calculate E or N sgmRNA in copies per ml; the limit of detections (LOD) for both E and N sgRNA assays were 12.5 copies per reaction or 150 copies per mL of BAL/nasal swab/nasal wash.

### Statistics Analysis

[0501] Data were plotted using Prism GraphPad 8.0. Wilcoxon rank sum exact test was performed to compare differences between groups with p-value <0.05 considered significant using SAS 9.4 (SAS Institute, Cary, NC).

### REFERENCES

[0502] 1. C. L. Hsieh et al., Structure-based design of prefusion-stabilized SARS-COV-2 spikes. Science 369, 1501-1505 (2020).
[0503] 2. T. Zhou et al., Structure-Based Design with Tag-Based Purification and In-Process Biotinylation Enable Streamlined Development of SARS-COV-2 Spike Molecular Probes. Cell Rep, 108322 (2020).
[0504] 3. J. Wrammert et al., Rapid cloning of high-affinity human monoclonal antibodies against influenza virus. Nature 453, 667-671 (2008).
[0505] 4. H. X. Liao et al., High-throughput isolation of immunoglobulin genes from single human B cells and expression as monoclonal antibodies. J Virol Methods 158, 171-179 (2009).
[0506] 5. T. B. Kepler et al., Reconstructing a B-Cell Clonal Lineage. II. Mutation, Selection, and Affinity Maturation. Front Immunol 5, 170 (2014).
[0507] 6. H. X. Liao et al., Co-evolution of a broadly neutralizing HIV-1 antibody and founder virus. Nature 496, 469-476 (2013).
[0508] 7. K. O. Saunders, Conceptual Approaches to Modulating Antibody Effector Functions and Circulation Half-Life. Front Immunol 10, 1296 (2019).
[0509] 8. D. Wrapp et al., Cryo-EM structure of the 2019-nCOV spike in the prefusion conformation. Science 367, 1260-1263 (2020).
[0510] 9. C. Suloway et al., Automated molecular microscopy: the new Leginon system. J Struct Biol 151, 41-60 (2005).
[0511] 10. S. Q. Zheng et al., MotionCor2: anisotropic correction of beam-induced motion for improved cryo-electron microscopy. Nat Methods 14, 331-332 (2017).
[0512] 11. A. Punjani, J. L. Rubinstein, D. J. Fleet, M. A. Brubaker, cryoSPARC: algorithms for rapid unsupervised cryo-EM structure determination. Nat Methods 14, 290-296 (2017).
[0513] 12. E. F. Pettersen et al., UCSF Chimera-A visualization system for exploratory research and analysis. Journal of Computational Chemistry 25, 1605-1612 (2004).
[0514] 13. P. Emsley, K. Cowtan, Coot: model-building tools for molecular graphics. Acta Crystallogr D Biol Crystallogr 60, 2126-2132 (2004).
[0515] 14. T. Croll, ISOLDE: a physically realistic environment for model building into low-resolution electron-density maps. Acta Crystallographica Section D 74, 519-530 (2018).
[0516] 15. P. V. Afonine et al., Real-space refinement in PHENIX for cryo-EM and crystallography. Acta Crystallographica Section D 74, 531-544 (2018).
[0517] 16. L. Schrodinger, The PyMOL Molecular Graphics System. (2015).
[0518] 17. T. D. Goddard et al., UCSF ChimeraX: Meeting modern challenges in visualization and analysis. Protein Sci 27, 14-25 (2018).
[0519] 18. J. D. Berry et al., Development and characterisation of neutralising monoclonal antibody to the SARS-coronavirus. J Virol Methods 120, 87-96 (2004).
[0520] 19. C. M. Coleman, M. B. Frieman, Growth and Quantification of MERS-COV Infection. Curr Protoc Microbiol 37, 15E 12 11-19 (2015).
[0521] 20. J. Kint, H. J. Maier, E. Jagt, Quantification of infectious bronchitis coronavirus by titration in vitro and in ovo. Methods Mol Biol 1282, 89-98 (2015).
[0522] 21. V. D. Menachery et al., SARS-like WIV1-COV poised for human emergence. Proc Natl Acad Sci U S A 113, 3048-3053 (2016).
[0523] 22. T. P. Sheahan et al., Broad-spectrum antiviral GS-5734 inhibits both epidemic and zoonotic coronaviruses. Sci Transl Med 9, (2017).
[0524] 23. Y. J. Hou et al., SARS-COV-2 Reverse Genetics Reveals a Variable Infection Gradient in the Respiratory Tract. Cell 182, 429-446 e414 (2020).
[0525] 24. B. Korber et al., Tracking Changes in SARS-COV-2 Spike: Evidence that D614G Increases Infectivity of the COVID-19 Virus. Cell 182, 812-827 e819 (2020).
[0526] 25. L. Naldini, U. Blomer, F. H. Gage, D. Trono, I. M. Verma, Efficient transfer, integration, and sustained long-term expression of the transgene in adult rat brains injected with a lentiviral vector. Proc Natl Acad Sci USA 93, 11382-11388 (1996).
[0527] 26. L. G. Perez, M. R. Costa, C. A. Todd, B. F. Haynes, D. C. Montefiori, Utilization of immunoglobulin G Fc receptors by human immunodeficiency virus type 1: a specific role for antibodies against the membrane-proximal external region of gp41. J Virol 83, 7397-7410 (2009).
[0528] 27. K. H. Dinnon, 3rd et al., A mouse-adapted model of SARS-COV-2 to test COVID-19 countermeasures. Nature, (2020).
[0529] 28. K. H. Dinnon, 3rd et al., A mouse-adapted model of SARS-COV-2 to test COVID-19 countermeasures. Nature, (2020).
[0530] 29. S. R. Leist et al., A Mouse-Adapted SARS-COV-2 Induces Acute Lung Injury and Mortality in Standard Laboratory Mice. Cell, (2020).
[0531] 30. R. Wolfel et al., Virological assessment of hospitalized patients with COVID-2019. Nature 581, 465-469 (2020).
[0532] 31. J. Yu et al., DNA vaccine protection against SARS-COV-2 in rhesus macaques. Science 369, 806-811 (2020).

### Example 6 DH1042-SARS-COV-2 Neutralizing Antibody

### Donor Selection, Antibody Gene Isolation, Sequencing, and Cloning

[0533] Donor Selection Isolation: Human antibody gene sequences were isolated from antigen-specific memory phenotype B cells from a convalescent COVID-19 donor using recombinant SARS-COV-2 spike protein hooks as previously described (2). FIG. 47 shows the course of selected donor's (ID #450905) COVID disease. Shown is a self-reported symptom severity score, viral load in nasal swab viral transport medium (qRT-PCR) and serum IgG area against NP and two S protein preparations. Thirty-six days post-symptom onset the selected donor had a serum neutralizing antibody titer of >640 against live SARS-COV-2, using a classic live virus PRNT assay (3). SARS-COV-2 Spike-specific memory B cell from cryopreserved donor PBMC form day 36 post symptom on set were sorted to isolate DH1042. Individual antigen-specific memory B cells were sorted into wells of 96-well plates containing a lysis buffer in preparation for RT-PCR amplification of the human IgG, IgK and IgL genes in each cell.

[0534] Sequencing/Cloning: The immunogenetics of DH1042 are detailed in Table 13. For in vitro and in vivo characterization of binding and function DH1042 Vh and VI were cloned respectively into protein expression vectors pH026103 LS.v2 and pK023879.v2 for transient mammalian expression of DH1042 as an IgG1 with the LS Fc modification (M428L/N434S) and an IgK (4). Amino acid sequences of the heavy and light chains are in Table 14. Small- and large-scale mammalian cell (293) expression cultures are used to produce mg quantities of protein which are subsequently protein A purified, quantified and confirmed to contain <2.0 EU/mg of endotoxin. This material is then used for in vitro and in vivo studies.

TABLE 13
DH1042 immunogenetics

| | VH Mut | VL Mut | CDRH3 | CDRL3 | | |
|---|---|---|---|---|---|---|
| Duke Ab ID | % | % | Length | Length | VH | VL |
| DH1042 | 2.0% | 0.7% | 16 | 9 | VH1-69 | VK1-39 |

TABLE 14
DH1042 amino acid sequences
(Vh/Vl are represented by the grey shaded sequences)

>DH1042 Heavy Chain pH026103_LS.v2
MGWSCIILFLVATATGVHS

[chemical structure]

[chemical structure]

[chemical structure]

ASTKGPSVFPLAPSSKSTSGGTAALGCLVKDYFPEPVTVSWNSGALTSGVHTFPAVLQS
SGLYSLSSVVTVPSSSLGTQTYICNVNHKPSNTKVDKKVEPKSCDKTHTCPPCPAPELLGGPSVFLF
PPKPKDTLMISRTPEVTCVVVDVSHEDPEVKENWYVDGVEVHNAKTKPREEQYNSTYRVVSVLTVLH
QDWLNGKEYKCKVSNKALPAPIEKTISKAKGQPREPQVYTLPPSRDELTKNQVSLTCLVKGFYPSDI
AVEWESNGQPENNYKTTPPVLDSDGSFFLYSKLTVDKSRWQQGNVFSCSVLHEALHSHYTQKSLSLS
PGK.
>DH1042 Light Chain pK023879.v2
MGWSCIILFLVATATGVHS

[chemical structure]

[chemical structure]

[sequence omitted]

### Binding Specificity and Epitope

[0535] DH1042 is SARS-COV-2 Spike Receptor Binding Domain (RBD) specific. DH1042 was screened for binding by standard ELISA against a panel of coronavirus antigens from SARS-Cov-2 (Spike, RBD, S2, NTD), SARS-COV-1 (SARS Spike, RBD, S1), MERS-COV (Spike, RBD, S1, S2), seasonal cold coronavirus (CoV-NL63, CoV-229E, CoV-HKUI, CoV-OC43), bat coronavirus (BCoV) and pangolin coronavirus (PCOV). FIG. 48 shows the area under the curve for DH1042 binding and positive control antibodies or anti-sera.

[0536] Negative stain electron microscopy was used to determine the footprint of DH1042 Fab binding to human SARS-Cov-2 spike (FIG. 49). DH1042 has a nearly vertical approach to spike binding and overlaps with the ACE2 (RBD binding) footprint. CryoEM studies are in progress to more finely map the DH1042-spike complex structure, epitope, and angle of approach of the antibody.

### In Vitro Blocking/Neutralization Potency

[0537] DH1042 blocks SARS-COV-2 Spike-RBD binding to human ACE2 and potently neutralizes both the D614 and G614 forms of the SARS-COV-2 virus. The latter is the predominant circulating strain in the United States (Table 15, FIG. 50). Specifically, DH1042 blocks SARS-COV-2 spike/RBD binding to human ACE2 in an ELISA-based assay with <200 ng/mL IC50 (Genscript), has a neutralization IC50 of 11 ng/ml in the VRC7480.D614G pseudovirus (293T/ACE2) assay, is a potent neutralizer (IC50 of 73 or 156 ng/mL) of authentic USA-WA-1-2020 (D614) virus in two independently run Plaque Reduction Neutralization Tests (PRNT) (3).

TABLE 15
In vitro potency against SARS-CoV-2

| | | ACE2 Blocking | Pseudovirus | Pseudovirus | Pseudovirus |
|---|---|---|---|---|---|
| Ab ID | Specificity | IC50 (μg/ml) | IC50 (μg/ml) | IC80 (μg/ml) | MPI |
| DH1042 | SARS-CoV-2- | <0.2 | 0.011 | 0.053 | 100 |
| | RBD | | | | |
| | | Duke RBL | Duke RBL | Bioqual | Bioqual |
| | | PRNT IC50 | PRNT IC90 | PRNT IC50 | PRNT IC90 |
| Ab ID | Specificity | (μg/mL) | (μg/mL) | (μg/mL) | (μg/mL) |
| DH1042 | SARS-CoV-2- | 0.073 | 0.625 | 0.156 | 0.625 |
| | RBD | | | | |

### SARS-COV-2 Spike/RBD Binding Kinetics

[0538] Using surface plasmon resonance (SPR, Bia3000) a kinetic study was performed to determine the binding kinetics of a Fab from DH1042 to SARS-COV-2 Spike. DH1042 has a Kd of 0.6 nM (FIG. 51). SPR was also used to determine binding kinetics of DH1042 (Hu IgG1-LS) to a panel of three human Fcg receptors (rhFcγRI/CD64, rhFcγRIIA/CD32, and rhFcγRIIIA/CD16a) (FIG. 52). Kd and on and off rates are summarized in Table 16.

TABLE 16
Kinetics of DH1042 (IgG1-LS) binding to
recombinant human Fc gamma receptors

| | ka | kd | Kd |
|---|---|---|---|
| Human Fc gamma Receptor | (1/Ms) | (1/s) | (nM) |
| FcgRI/CD64 | 4.140E+5 | 4.140E+5 | 4.140E+5 |
| FcgRIIA/CD32a | 5.646E+5 | 0.8099 | 1434 |
| FcgRIIIA/CD16a | 7.548E+5 | 0.3061 | 405.5 |

### Pre-clinical Safety (Recombinant DH1042 Protein)

[0539] Reactivity with Human Auto-antigens: DH1042 does not react with known human autoantigens. Using the Zeus Scientific ANA Hep-2 test we observed no significant staining with DH1042 (25 and 50 μg/mL tested) using standard immunofluorescent analysis (Zeus Scientific ANA Test: FIG. 53, Table 17). Cytoplasmic/nuclear staining is observed with the positive control antibody.

[0540] DH1042 was also screened for reactivity in the ZEUS AtheNA multiplex luminex bead-based assay to look for reactivity with nuclear and cytoplasmic proteins: SSA, Sjogren's syndrome antigen A: SSB, Sjogren's syndrome antigen B: Sm, small nuclear riboproteins: RNP, ribonucleoprotein: Scl 70, scleroderma 70; Jol, dsDNA, double-stranded DNA: Cent B, centromere B; and Histone. DH1042 was tested at multiple concentrations in the AtheNA assay along with negative and positive controls. DH1042 is negative for reactivity with all tested auto antigens.

TABLE 17
Quantitative AtheNA autoantigen panel

| | Test | | | | | | | | | |
|---|---|---|---|---|---|---|---|---|---|---|
| | Concentration | | | | | | | | | |
| mAb | (mg/mL) | SSA | SSB | Sm | RNP | Scl 70 | Jo 1 | dsDNA | Cent B | Histone |
| DH1042 | 50 | 2 | 4 | 3 | 6 | 1 | 2 | 0 | 56 | 9 |
| | 25 | 2 | 5 | 2 | 4 | 2 | 4 | 0 | 26 | 6 |
| | 12.5 | 3 | 2 | 1 | 0 | 0 | 1 | 2 | 12 | 3 |
| | 6.25 | 1 | 3 | 3 | 1 | 1 | 2 | 2 | 6 | 2 |
| Neg. | | — | — | — | — | — | — | — | — | — |
| Control | | | | | | | | | | |
| Pos. | | 447 | 485 | 839 | 1017 | 356 | 542 | 792 | 331 | 678 |
| Control | | | | | | | | | | |

* Negative is <100, positive is >120, and equivocal is 100 to 120.

### Tissue Cross-Reactivity Study (GLP):

[0541] A GLP Tissue Cross Reactivity study with DH1042 (aka Ab026103) on normal human tissues is in progress at Charles River Laboratories. An un-audited interim report was received Oct. 23, 2020 and has the following conclusion about DH1042 (aka Ab026103).

[0542] Staining with Ab026103 was limited to epithelial cells in the breast and/or pituitary. The epithelial staining with Ab026103 was cytoplasmic in nature, and monoclonal antibody binding to cytoplasmic sites in tissue cross-reactivity studies is considered of little to no toxicologic significance due to the limited ability of antibody drugs to access the cytoplasmic compartment in vivo (5, 6).

DH1042 mRNA Delivery

[0543] Messenger RNA (mRNA) is a promising new prophylactic delivery platform. While its application to prophylactic/therapeutic targets including infectious diseases is still in its infancy, work by our team and others has shown that it is transformative (7, 8). We have established a nucleoside-modified mRNA platform that has the combined benefits of potent delivery, safety and straightforward, rapid production suitable to deliver medical countermeasures. Specifically, target mRNA is in vitro transcribed with the modified nucleoside 1-methylpseudouridine (m1ψ) which we have demonstrated prevents innate immune sensing and increases mRNA translation in vivo (7, 8). Systemic administration of 1.4 mg/kg of nucleoside-modified mRNA encapsulated in lipid nanoparticles encoding the anti-HIV-1 antibody VRC01 resulted in plasma antibody titers of ˜170 mcg/mL 24 hours post-injection in humanized mice. Protective antibody titers were maintained for >1 week following a single administration and were maintained at ˜40 mcg/mL with repeat administration for over five weeks. Importantly, treatment with half this dose was sufficient to provide full protection from intravenous HIV-1 challenge, demonstrating that mRNA is a viable delivery platform for passive immunotherapy (7, 8).

[0544] Synthesized DH1042 antibody variable heavy and light chain gene sequences were cloned into DNA vectors to serve as template for in vitro transcription. Three IVT plasmids have been generated with the optimal 5′ and 3′ untranslated regions, polyA tail and codon optimized human IgG1 LS, IgK or IgL constant region sequence. (FIG. 25). These plasmids are linearized using two unique restriction enzyme sites and the synthesized variable region DNA is cloned. Plasmids have kanamycin resistance for down-stream cGMP applications.

[0545] Only the IgH and IgK plasmids were needed for DH1042 as it contains a natural kappa light chain. In frame inserts were sequence confirmed and the two (H/K) IVT plasmids grown in large scale, purified with a low endotoxin plasmid prep kit and then used in IVT reactions to generate mRNA for in vitro and in vivo pre-clinical testing. It is critical that the endotoxin levels are below 2 EU/mg of plasmid DNA to prevent downstream complications with animal experiments. FIG. 24C summarizes the DNA, RNA and AA sequences for the heavy (H026103 NC-IVT.1) and light (K023879 NC-IVT.2) chain IVT plasmids. Green Text=Leader Sequence in DNA/mRNA/Protein, Red Text=Fv fragment cloned into the vector and confirmed in frame with Fc, and Black Text=human Heavy (lgG1-LS) or Light (kappa/lambda) Fc (from vector).

### IVT Plasmids Used to Make Modified RNA for Pre-clinical Animal Studies

[0546] Insert sequence confirmed Heavy and Light chain expressing IVT plasmids were expanded in E, coli XL-10 cells to ˜1000 mg/L at 37° C., using standard procedures. Plasmids were purified with commercial low endotoxin plasmid prep kits. Plasmid DNA was also run through a MiraCLEAN endotoxin removal step to ensure low endotoxin contamination of the resulting DNA template for IVT (FIG. 54). It is critical that the endotoxin levels are below 2 EU/mg DNA to prevent downstream complications with animal experiments. Plasmid concentration was determined by Nanodrop (Table 18). Endotoxin level quantified by EndosafeR nexgen-MCS™ benchtop spectrophotometer that uses disposable cartridges containing limulus amebocyte lysate (LAL), chromogenic substrate and controls to quantitate the unknown concentration of endotoxin in samples. Diluted RNA is added to the cartridge and the instrument calculates the endotoxin concentration based on the change of absorbance and comparison to an archived standard curve. An endotoxin concentration is reported if the internal spike recovery, which assesses assay interference and the test suitability, and an evaluation of % CV between replicates, meet acceptance criteria. Endotoxin levels meet criteria to be <2 EU/mg for down-stream use in pre-clinical animal models per Duke Institutional Animal Care and Use Committee (Table 18).

TABLE 18
DH1042 IVT Plasmids

| | | Conc. | Endotoxin Value |
|---|---|---|---|
| Antibody Name | Plasmid | (mg/mL) | (EU/mg) |
| DH1042 | H026103_NC-IVT.1 | 1.11 | <0.0455 |
| | K023879_NC-IVT.2 | 1.44 | <0.357 |

Production of Modified mRNA for Pre-clinical Animal Studies

### In Vitro Transcription (IVT):

[0547] Heavy and Light chain expressing IVT plasmids for DH1042 were linearized by digestion with the restriction enzyme Notl for approximately 2 hours at 37° C. A portion of the linearized DNA is mixed with the following RNA transcription components: T7 transcription buffer, T7 polymerase, ribonucleotide triphosphates (ATP, CTP, GTP), a modified nucleoside N (1)-methylpseudouridine (m1ψ) and Cap analog. The reaction mixture is incubated at 37° C. for approximately 2 hours. DNase is then added to digest the linearized template DNA, for 10-15 minutes at 37° C., in order to facilitate mRNA purification. Next, 50 mM ethylenediaminetetraacetic acid (EDTA) is added to minimize mRNA precipitation and the reaction is incubated for an additional 10-15 minutes at 37° C.

[0548] For pre-clinical studies heavy and light chain mRNAs are purified by LiCl precipitation, pelleted, washed with ethanol, briefly dried, and then resuspend in nuclease-free H2O. Purified RNA retains and bulks are handed off to DHVI GMP analytical group for pre-clinical testing (concentration, endotoxin, dsRNA).

mRNA Concentration and Yield:

[0549] RNA concentration is determined using the Molecular Devices M5 SpectraMax plate reader and the SpectraDrop Micro-Volume Microplate, which permits absorbance measurements with sample volumes as low as 2 uL. RNA samples are diluted in water and added to the microplate wells. Absorbance values are measured at 260 nm and normalized to a 1.0 cm path length. The concentration of RNA is determined by multiplying the normalized absorbance value at 260 nm by the concentration factor, 40, which is based on an A260 reading of 1.0 being equivalent to ˜40 μg/mL single-stranded RNA, and the appropriate dilution factor. DH1042 heavy and light chain pre-clinical study supply run concentration and yield is shown in Table 19.

TABLE 19
Concentration and yield for pre-clinical supply runs of mRNA

| | | Batch* | RNA | Total |
|---|---|---|---|---|
| | Plasmid DNA | Volume | Conc. | RNA |
| Antibody | Template | (mL) | (mg/mL) | (mg) |
| DH1042 | H026103_NC-IVT.1 | 9.3 | 1.024 | 9.52 |
| | K023879_NC-IVT.2 | 9.3 | 1.050 | 10.14 |

*pre-clinical supply run tested 2 Sep. 2020

### Endotoxin Testing:

[0550] Endotoxin levels in RNA product are quantified the Endosafe R nexgen-PTS™ handheld spectrophotometer that uses disposable cartridges containing limulus amebocyte lysate (LAL), chromogenic substrate and controls to quantitate the unknown concentration of endotoxin in samples. Diluted RNA is added to the cartridge and the instrument calculates the endotoxin concentration based on the change of absorbance and comparison to an archived standard curve. An endotoxin concentration is reported if the internal spike recovery, which assesses assay interference and the test suitability, and an evaluation of % CV between replicates, meet acceptance criteria. DH1042 heavy and light chain supply run RNA meet the <2 EU/mg pass criteria for down-stream use in pre-clinical animal models per Duke Institutional Animal Care and Use Committee.

TABLE 20
Endotoxin testing for pre-clinical supply runs of mRNA

| | | RNA | Endotoxin | Endotoxin |
|---|---|---|---|---|
| | | Conc. | Value | Value |
| Antibody | Plasmid DNA | (mg/mL) | (EU/mL)* | (EU/mg)** |
| DH1042 | H026103_NC-IVT.1 | 1.024 | <0.500 | <0.488 |
| | K023879_NC-IVT.2 | 1.050 | <0.500 | <0.476 |

*pre-clinical supply run tested 2 Sep. 2020, 0.500 represents <0.500 EU/mL, or below limit of quantitation of endotoxin chip
**0.### represents <0.### EU/mg, which is calculated by dividing <0.500 (EU/mL) by the RNA concentration (mg/mL)

### Double Stranded (ds) RNA Testing:

[0551] Residual dsRNA in pre-clinical supply run batch RNA is determined using a modified version of a previously described assay (9). The slot blot assay involves the capture of nucleic acid on a nylon membrane followed by addition of an anti-dsRNA antibody, J2 IgG2a. A signal is generated by the subsequent additions of goat anti-mouse IgG labeled with horseradish peroxidase (HRP) and chemiluminescent substrate. A semi-quantitative evaluation of the dsRNA content in an RNA sample is made by comparing the signal intensities of varying concentrations of the standard, a dsRNA ladder comprised of dsRNA fragments from 21-500 base pairs, and the sample. Both heavy and light chain RNA supply runs for DH1042 fall below 12.5 ng/200 ng load (FIG. 55).

### In Vitro RNA Launched Antibody Expression:

[0552] In vitro RNA expression of antibody will be assessed in HEK 293T cells through transient transfection using Lipofectamine™ Messenger Max™, a commercially available cationic lipid. Briefly, heavy and light chain RNA will be mixed at equimolar ratios, will be complexed with the lipid mixture and added to adherent HEK 293T cells. Cells are incubated for up to 72 hours to allow for the expression and secretion of antibody. Supernatants will be harvested, clarified, and the concentration of antibody in the supernatant is determined by biolayer interferometry (BLI) and Luminex bead-based binding.

[0553] In the BLI assay, a concentration series of Human IgG1 antibody reference standard or test sample will be captured on an anti-human Fc sensor. An evaluation of the concentration of antibody in the supernatant sample will be determined by extrapolation from the reference standard curve, where the response of the reference standard concentrations has been fit to a 4-parameter logistic equation. In the Luminex bead-based assay recombinant SARS-COV-2 spike protein will be conjugated to a fluorescent Luminex bead. A concentration series of DH1042 antibody reference standard or test sample will be captured on the bead. An evaluation of the concentration of antibody in the supernatant sample will be determined by extrapolation from the reference standard curve, where the response of the reference standard concentrations has been fit to a 4-parameter logistic equation.

LNP Encapsulation of mRNA for Pre-Clinical Animal Studies

[0554] Heavy and light chain mRNA are pre-mixed at an equimolar ratio for LNP encapsulation using proprietary lipid formulations and processes. Pre-clinical mRNA-LNP formulations must have <2 EU/mg endotoxin for down-stream use in pre-clinical animal models per Duke Institutional Animal Care and Use Committee. DH1042 mRNA was formulated with LNP-1 (Aka LNP-A) for in vivo PK and potency studies (FIG. 56).

### Pre-Clinical Pharmacokinetics (PK) of DH1042

### Protein Delivered DH1042 Antibody:

[0555] DH1042 protein dose and route PK studies were performed in Tg32 mice (also called hFcRn Tg32 or FcRn−/−hFcRn line 32 Tg) (FIG. 57). These mice carry a knock-out mutation for the mouse Fcgrt (Fc receptor, IgG, alpha chain transporter) gene and a transgene expressing the human FCGRT gene under the control of its own native promoter (hTg32). These mice are useful in evaluating the pharmacokinetics and pharmacodynamics of human immunoglobulin G (IgG) and Fc-domain based therapeutics.

[0556] Serum DH1042 antibody levels were determined with a Spike-specific luminex bead based anti-HuIgG quantitative assay. Recombinant DH1042 was used to generate an antigen-specific HuIgG standard curve to estimate ug/mL in the test samples.

[0557] The in vivo expressed maximum concentration (Cmax), time to reach maximum concentration (Tmax) and the human antibody half-life in the Tg32 mouse model was calculated (Table 21). Across both doses and routes, the average time to reach maximum expression level was 1.2 days and the half-life of the human antibody in a Tg32 mouse is estimated to be 8.5 days. Antibody protein dose and route PK studies in non-human primates and Syrian golden hamsters are planned to start November 2020.

TABLE 21
Pre-clinical PK - Protein delivered DH1042 antibody in mice

| | | | | Ab Dose | T half | Cmax | Tmax |
|---|---|---|---|---|---|---|---|
| Antibody | Model | Formulation | Route | (mg/kg) | (Days) | (ug/mL) | (Days) |
| DH1042 | Tg32 | Protein | IV | 5 | 8.9 | 25 | 1.0 |
| | Mouse | | | 10 | 9.9 | 62 | 1.6 |
| | | | IM | 5 | 7.6 | 19 | 1.0 |
| | | | | 10 | 7.0 | 58 | 1.0 |

* Dose adjusted from ug/mouse to mg/kg based on average mouse weight per study

[0558] mRNA-LNP delivered DH1042 antibody:

[0559] DH1042 mRNA-LNP dose and route PK studies were performed in Tg32 mice as described herein (FIG. 58), mRNA ug/mouse doses were selected for IV gene-delivered approach that approximated Cmax with recombinant protein in platform development studies. DH1042 antibody levels (expressed in vivo from mRNA) were determined with a Spike-specific luminex bead based anti-HuIgG quantitative assay as described herein. FIG. 59 shows PK studies in hamsters.

[0560] The in vivo expressed antibody maximum concentration (Cmax), time to reach maximum concentration (Tmax) and the human antibody half-life in the Tg32 mouse model was calculated (Table 22). Across doses, the average time to reach maximum expression level was 4.0 days and the half-life of the human antibody in a Tg32 mouse is 4.3 days.

TABLE 22
Pre-clinical PK - mRNA-LNP delivered DH1042 antibody in mice

| | | | | RNA Dose | T half | Cmax | Tmax |
|---|---|---|---|---|---|---|---|
| Antibody | Model | Formulation | Route | (mg/kg)* | (Days) | (ug/mL) | (Days) |
| DH1042 | Tg32 | mRNA-LNP-1 | IV | 0.5 | 3.4 | 26.7 | 4.0 |
| | Mouse | | | 0.9 | 5.6 | 63.2 | 3.4 |
| | | | | 1.9 | 3.9 | 182.6 | 4.6 |

*Dose adjusted from ug/mouse to mg/kg based on average mouse weight per study

[0561] One metric for the mRNA-delivered platform was to exceed 10 μg/mL within 72 hours and therefore we have accomplished this with all test doses of formulated DH1042 mRNA in Tg32 mice. It is important to note that no changes in animal body weight or temperature were observed in any of the pre-clinical mouse studies with IV administration of mRNA-LNP. DH1042 mRNA-LNP dose and route PK studies in Syrian golden hamsters are planned.

### Pre-clinical In Vivo Potency of DH1042 (In Progress)

[0562] Protein delivered DH1042 antibody, Protection from SARS-COV-2 challenge in mice:

[0563] DH1042 recombinant protein treatment protects/reduces viral load in SARS-COV-2 pre- and post-exposure mouse challenge models. First, we tested DH1042 versus a control antibody (CH65, influenza neutralizing human IgG1 with LS backbone) in a Pre-exposure prophylaxis SARS-COV-2 acquisition mouse model (FIG. 60A). Aged (12 months old) BALB/c mice were injected intraperitoneally with 300 μg/mouse of recombinant DH1042 antibody, and challenged intranasally with a SARS-COV-2 mouse-adapted (MA) isolate (10) twelve hours later. Administration of DH1042 protected all mice from detectable infectious virus in the lungs 4 days after challenge (FIG. 60A).

[0564] Next we tested DH1042 versus control antibody in a therapeutic treatment model (FIG. 60B). Aged (12 months old) BALB/c mice injected intraperitoneally with 300 ug/mouse of recombinant DH1042 antibody twelve hours after SARS-COV-2 infection. Significantly reduced lung infectious virus titers, with 10/10 of the mice having undetectable infectious virus in the lung 4 days after viral infection (FIG. 60B).

[0565] Thus, DH1042 potently protected mice from SARS-COV-2 infection when administered prophylactically or therapeutically.

mRNA-LNP delivered DH1042 antibody. Protection from SARS-COV-2 challenge in Syrian Golden hamsters:

[0566] DH1042 mRNA-LNP prepared and used in the PK studies described herein was next used to determine in vivo potency of the DH1042 mRNA-launched antibody in protecting Syrian Golden hamsters from SARS-COV-2 viral challenge. We tested DH1042 mRNA versus challenge only in our pre-exposure prophylaxis SARS-COV-2 acquisition hamster model (FIG. 61). Hamsters were injected IV with 1 mg/kg formulated DH1042 RNA, and challenged intranasally with a SARS-COV-2 24 hours later. Administration of DH1042 protected all hamsters form virus-induced weight loss and there was undetectable infectious virus in oral swabs (qPCR) 5 and 7 days after challenge (FIG. 61).

[0567] Thus, DH1042 mRNA-LNP produced antibody in vivo and potently protects hamsters from SARS-COV-2 infection.

Protein Delivered DH1042 Antibody. Protection from SARS-COV-2 Challenge:

[0568] DH1042 pre-exposure protection studies in Syrian golden hamsters with wild-type SARS-COV-2 are in progress in the Duke Regional Biocontainment Laboratory ABSL3. Animals were treated IP with 5 or 10 mg/kg DH1042 recombinant Ab 24 hours prior to intranasal viral challenge and monitored for humane endpoints and viral load.

[0569] DH1042 pre-exposure protection studies in K18-hACE2 mice with wild-type SARS-CoV-2 are planned in the Duke Regional Biocontainment Laboratory ABSL3. Animals will be treated IP and IM with 1-10 mg/kg DH1042 recombinant Ab 24 hours prior to intranasal viral challenge and monitored for humane endpoints and viral load.

### Human Antibodies Against SARS-COV-2 (COVID)-19):

[0570] DH1042 is one of a panel of over 1,737 SARS-COV-2 binding/neutralizing antibodies isolated by the platform and approach described herein. Two additional potent neutralizing antibodies in this panel (DH1041 and DH1043) are very similar to DH1042 but have an unfavorable human tissue cross reactivity profile. Although these two antibodies are not progressing for human use, we do have substantial mouse and non-human primate (NHP) in vivo potency data that may inform our understanding of the potential for a closely related antibody (DH1042) to protect from viral challenge.

[0571] DH1041, DH1043 and DH1042 have nearly identical in vitro neutralizing potency, binding and affinity characteristics. All three antibodies bind the spike protein with similar vertical angles of approach relative to the vertical axis of the S trimer and the epitopes of antibodies on the RBD overlap with that of the ACE-2 receptor (11), consistent with the observation that the binding of these antibodies blocks ACE-2 binding. It is of note that this target epitope for all three antibodies (FIG. 49) is also shared with a recently described antibody P2B-2F6 (12) and 2 single-chain nanobodies (13, 14).

Protein Delivered DH1041 Antibody. Protection from SARS-COV-2 Challenge in Mice:

[0572] Although not advanced for down-selection, DH1041 and DH1043 were previously tested for in vivo function and demonstrate significant potency to protect/reduce viral load in SARS-COV-2 mouse and NHP challenge models. First we tested DH1041 versus a control antibody (CH65, influenza neutralizing human IgG1 with LS backbone) in a prophylaxis SARS-COV-2 acquisition mouse model (FIG. 62A). Aged (12 months old) BALB/c mice were injected intraperitoneally with 300 μg/mouse of recombinant DH1041 antibody, and challenged intranasally with a SARS-COV-2 mouse-adapted (MA) isolate (10) twelve hours later. Administration of DH1041 protected all mice from detectable infectious virus in the lungs 48 hours after challenge (FIG. 62A).

[0573] Next we tested DH1041 versus control antibody in a therapeutic treatment model (FIG. 62B). Aged (12 months old) BALB/c mice injected intraperitoneally with 300 ug/mouse of recombinant DH1041 antibody twelve hours after SARS-COV-2 infection. Significantly reduced lung infectious virus titers, with ⅗ of the mice having undetectable infectious virus in the lung 48 hours after viral infection (FIG. 19B).

[0574] Thus, DH1041 potently protected mice from SARS-COV-2 infection when administered prophylactically or therapeutically.

Protein Delivered DH1041 and DH1043 Antibody, Protection from SARS-COV-2 Challenge in Non-Human Primates:

[0575] In an independent study run at Bioqual in NHPs, we assessed the in vivo potency of DH1041 and DH1043 in a cynomolgus macaque SARS-COV-2 intranasal/intratracheal challenge model (FIG. 63). Macaques were IV administered 10 mg/kg DH1041, DH1043, or CH65 control antibody three days prior to infection with SARS-COV-2. At the day of challenge, the animals had circulating levels of SARS-COV-2 specific DH1041 and DH1043 antibodies in the serum (FIG. 63B). Viral load was assessed on Day 2 and Day 4 post challenge and monitored by RT-CR for subgenomic RNA (sgRNA) for the E and N genes, indicative of viral load. E gene sgRNA and N gene sgRNA were significantly reduced in the lower and upper respiratory tract based on analyses of bronchoalveolar lavage fluid and nasal wash samples (FIGS. 63C and 63D). These results demonstrate that both DH1041 and DH1043, closely related antibodies to DH1042, potently protected NHPs from SARS-COV-2 infection when administered prophylactically.

### REFERENCES

[0576] 1. Sempowski G D, Saunders K O, Acharya P, Wiehe K J, Haynes B F. Pandemic Preparedness: Developing Vaccines and Therapeutic Antibodies For COVID-19. Cell. 2020: 181 (7): 1458-63. Epub 2020 Jun. 4, doi: 10.1016/j.cell.2020.05.041. PubMed PMID: 32492407: PMCID: PMC7250787.
[0577] 2. Liao H X, Levesque M C, Nagel A, Dixon A, Zhang R, Walter E, Parks R, Whitesides J, Marshall D J, Hwang K K, Yang Y, Chen X, Gao F, Munshaw S, Kepler T B, Denny T, Moody M A, Haynes B F. High-throughput isolation of immunoglobulin genes from single human B cells and expression as monoclonal antibodies. J Virol Methods. 2009: 158 (1-2): 171-9, doi: 10.1016/j.jviromet.2009.02.014. PubMed PMID: 19428587; PMCID: PMC2805188.
[0578] 3. Berry J D, Jones S, Drebot M A, Andonov A, Sabara M, Yuan X Y, Weingartl H, Fernando L, Marszal P, Gren J, Nicolas B, Andonova M, Ranada F, Gubbins M J, Ball T B, Kitching P, Li Y, Kabani A, Plummer F. Development and characterisation of neutralising monoclonal antibody to the SARS-coronavirus. J Virol Methods. 2004: 120 (1): 87-96. Epub 2004 Jul. 6, doi: 10.1016/j.jviromet.2004.04.009. PubMed PMID: 15234813: PMCID: PMC7119589.
[0579] 4. Ko SY, Pegu A, Rudicell R S, Yang Z Y, Joyce M G, Chen X, Wang K, Bao S, Kraemer T D, Rath T, Zeng M, Schmidt S D, Todd J P, Penzak S R, Saunders K O, Nason M C, Haase A T, Rao S S, Blumberg R S, Mascola J R, Nabel G J. Enhanced neonatal Fc receptor function improves protection against primate SHIV infection. Nature. 2014: 514 (7524): 642-5. Epub 2014 Aug. 15, doi: 10.1038/nature13612. PubMed PMID: 25119033: PMCID: PMC4433741.
[0580] 5. Hall W, Price-Schiavi S, Wicks J, Rojko J. Tissue Cross-Reactivity Studies for Monoclonal Antibodies: Predictive Value and Use for Selection of Relevant Animal Species for Toxicity Testing. In: J A C, editor. Preclinical Safety Evaluation of Biopharmaceuticals: A Science-Based Approach to Facilitating Clinical Trials: Wiley-Interscience: 2008, p. 208-40.
[0581] 6. Leach M W, Halpern W G, Johnson C W, Rojko J L, MacLachlan T K, Chan C M, Galbreath E J, Ndifor A M, Blanset D L, Polack E, Cavagnaro J A. Use of tissue cross-reactivity studies in the development of antibody-based biopharmaceuticals: history, experience, methodology, and future directions. Toxicologic pathology. 2010: 38 (7): 1138-66. Epub 2010 Oct. 12, doi: 10.1177/0192623310382559. PubMed PMID: 20926828.
[0582] 7. Pardi N, Secreto A J, Shan X, Debonera F, Glover J, Yi Y, Muramatsu H, Ni H, Mui B L, Tam Y K, Shaheen F, Collman R G, Kariko K, Danet-Desnoyers G A, Madden T D, Hope M J, Weissman D. Administration of nucleoside-modified mRNA encoding broadly neutralizing antibody protects humanized mice from HIV-1 challenge. Nat Commun. 2017:8:14630, doi: 10.1038/ncomms14630. PubMed PMID: 28251988: PMCID: PMC5337964.
[0583] 8. Pardi N, Hogan M J, Pelc R S, Muramatsu H, Andersen H, DeMaso C R, Dowd K A, Sutherland L L, Scearce R M, Parks R, Wagner W, Granados A, Greenhouse J, Walker M, Willis E, Yu J S, McGee C E, Sempowski G D, Mui B L, Tam Y K, Huang Y J, Vanlandingham D, Holmes V M, Balachandran H, Sahu S, Lifton M, Higgs S, Hensley S E, Madden T D, Hope M J, Kariko K, Santra S, Graham B S, Lewis M G, Pierson T C, Haynes B F, Weissman D. Zika virus protection by a single low-dose nucleoside-modified mRNA vaccination. Nature. 2017: 543 (7644): 248-51, doi: 10.1038/nature21428. PubMed PMID: 28151488: PMCID: PMC5344708.
[0584] 9. Kariko K, Muramatsu H, Ludwig J, Weissman D. Generating the optimal mRNA for therapy: HPLC purification eliminates immune activation and improves translation of nucleoside-modified, protein-encoding mRNA. Nucleic Acids Res. 2011: 39 (21): e142. Epub 2011 Sep. 6, doi: 10.1093/nar/gkr695. PubMed PMID: 21890902: PMCID: PMC3241667.
[0585] 10. Dinnon K H, 3rd, Leist S R, Schafer A, Edwards C E, Martinez D R, Montgomery S A, West A, Yount B L, Jr., Hou Y J, Adams L E, Gully K L, Brown A J, Huang E, Bryant M D, Choong I C, Glenn J S, Gralinski L E, Sheahan T P, Baric R S. A mouse-adapted model of SARS-COV-2 to test COVID-19 countermeasures. Nature. 2020. Epub 2020 Aug. 28, doi: 10.1038/s41586-020-2708-8. PubMed PMID: 32854108.
[0586] 11. Wang Q, Zhang Y, Wu L, Niu S, Song C, Zhang Z, Lu G, Qiao C, Hu Y, Yuen K Y, Wang Q, Zhou H, Yan J, Qi J. Structural and Functional Basis of SARS-COV-2 Entry by Using Human ACE2. Cell. 2020: 181 (4): 894-904 e9. Epub 2020 Apr. 11, doi: 10.1016/j.cell.2020.03.045. PubMed PMID: 32275855: PMCID: PMC7144619.
[0587] 12. Ju B, Zhang Q, Ge J W, Wang R K, Sun J, Ge X Y, Yu J Z, Shan S S, Zhou B, Song S, Tang X, Yu J F, Lan J, Yuan J, Wang H Y, Zhao J N, Zhang S Y, Wang Y C, Shi X L, Liu L, Zhao J C, Wang X Q, Zhang Z, Zhang L Q. Human neutralizing antibodies elicited by SARS-COV-2 infection. Nature. 2020: 584 (7819): 115-+. PubMed PMID: WOS: 000554511300002.
[0588] 13. Huo J D, Le Bas A, Ruza R R, Duyvesteyn H M E, Mikolajek H, Malinauskas T, Tan T K, Rijal P, Dumoux M, Ward P N, Ren J S, Zhou D M, Harrison P J, Weckener M, Clare D K, Vogirala V K, Radecke J, Moynie L, Zhao Y G, Gilbert-Jaramillo J, Knight M L, Tree J A, Buttigieg K R, Coombes N, Elmore M J, Carroll M W, Carrique L, Shah P N M, James W, Townsend A R, Stuart D I, Owens R J, Naismith J H. Neutralizing nanobodies bind SARS-COV-2 spike RBD and block interaction with ACE2. Nat Struct Mol Biol. 2020. PubMed PMID: WOS: 000548197600003.
[0589] 14. Zhou D M, Duyvesteyn H M E, Chen C P, Huang C G, Chen T H, Shih S R, Lin Y C, Cheng C Y, Cheng S H, Huang Y C, Lin T Y, Ma C, Huo J D, Carrique L, Malinauskas T, Ruza R R, Shah P N M, Tan T K, Rijal P, Donat R F, Godwin K, Buttigieg K R, Tree J A, Radecke J, Paterson N G, Supasa P, Mongkolsapaya J, Screaton G R, Carroll M W, Gilbert-Jaramillo J, Knight M L, James W, Owens R J, Naismith J H, Townsend A R, Fry E E, Zhao Y G, Ren J S, Stuart D I, Huang K Y A. Structural basis for the neutralization of SARS-COV-2 by an antibody from a convalescent patient. Nat Struct Mol Biol. 2020. PubMed PMID: WOS: 000559353900001.

### Example 7 Effect of Natural Mutations of SARS-COV-2 on Spike Structure, Conformation and Antigenicity

[0590] The data in this example demonstrate further the breadth of the antibody DH1047 against different variant spikes, including different versions of the South African spike and the Brazilian P. I spike.

### Binding of SARS-COV-2 S Protein Variants to ACE2 Receptor and Antibodies

[0591] We used the previously described S-GSAS-D614G S ectodomain as template here (See FIG. 64) (referred to as “D614G spike” in the rest of the manuscript). This template includes SARS-COV-2 S residues 1-1208, a “RRAR” to “GSAS” substitution that renders the furin cleavage site inactive, a foldon trimerization motif at the spike C-terminus, followed by a C-terminal TwinStrep tag. All purified S proteins showed similar migration profiles on SDS-PAGE and size exclusion chromatography (SEC), with high-quality spike preparations confirmed by negative stain electron microscopy (NSEM).

[0592] We measured spike binding to the ACE2 receptor ectodomain and to Abs using surface plasmon resonance (SPR) and ELISA (FIGS. 64, 65-66). Abs included RBD-directed, potent nAbs DH1041 and DH1043, whose epitopes overlap with the ACE2 binding site, RBD-directed highly cross-reactive nAb DH1047 that neutralizes SARS-COV-1, SARS-COV-2 and bat CoVs, NTD-directed nAbs DH1050.1 and DH1050.2 that bind an antigenic supersite, NTD-directed non-neutralizing Ab (nnAb) DH1052, fusion peptide-directed cross-reactive Ab DH1058, and S2 glycan cluster directed nnAb 2G12. All variants bound ACE2 at higher levels compared to the D614G spike (FIGS. 65-66), with S-GSAS-B.1.1.7 (“B.1.1.7 spike”) displaying the greatest increase. DH1047 showed similar binding levels to all spike variants (FIGS. 65-66), consistent with neutralization of B.1.1.7 and B.1.351 by DH1047. The RBD-directed nAb DH1041 showed similar binding levels to the B. 1.1.7 and D614G spikes, consistent with its neutralization of the B. 1.1.7 pseudovirus. The S-GSAS-D614G-K417-E484K-N501Y (or the “triple mutant spike”) showed reduced binding to RBD-directed nAbs DH1041 and DH1043. These results are consistent with the inability of Class 2 RBD binding Abs, where the E484K substitution occurs within the epitope, to neutralize variants that harbor the E484K substitution.

[0593] We tested several variants in the B.1.351 spike backbone (FIGS. 64, 65-66). We found that the commonly occurring 242-244 deletion, and a rare R246I substitution that is included in some reagent panels and candidate vaccine, can each impact not only binding of NTD-directed Abs, but also of RDB-directed Abs DH1041 and DH1043. While binding of NTD-directed nAbs DH1050.1 and DH1050.2 to B.1.1.7 and B.1.351 spikes was dramatically reduced. binding to triple mutant spike and S-GSAS-P.1 (or “P.1-like spike”) remained unchanged. This is consistent with neutralization data, where mAbs 5-24 and 4-8 that target the same antigenic supersite as DH1050.1, lost activity against B.1.351 but neutralized P.1.

[0594] The binding data were consistent with published neutralization data. B. 1.1.7 spike affinity for ACE2 was ˜5-fold improved over the D614G spike a result of the N501Y substitution. We measured nM affinity of the B. 1.1.7 spike for NTD-directed nAb DH1050.1. albeit at substantially reduced binding levels relative to the D614G spike (FIGS. 65-66), consistent with impairment of the NTD antigenic supersite in B.1.1.7, while retaining robust binding to most RBD-directed antibodies.

[0595] In summary, the binding data are consistent with biological data obtained in in vitro neutralization assays, thus establishing that our SARS-COV-2 S ectodomain constructs are an effective mimic of native spikes and supporting their use for studying structural changes due to amino acid substitutions in spike variants.

[0596] SPR methods. Antibody binding to SARS-COV-2 spike and RBD constructs was assessed using SPR on a Biacore T-200 (Cytiva. MA, formerly GE Healthcare) with HBS buffer supplemented with 3 mM EDTA and 0.05% surfactant P-20 (HBS-EP+. Cytiva. MA). All binding assays were performed at 25° C. Spike variants were captured on a Series S Strepavidin (SA) chip (Cytiva. MA) by flowing over 200 nM of the spike for 60 s at 10 uL/min flowrate. The Fabs were injected at concentrations ranging from 0.625 nM to 800 nM (2-fold serial dilution) using the single cycle kinetics mode with 5 concentration per cycle. For the single injection assay, the Fabs were injected at a concentration of 200 nM. A contact time of 60s, dissociation time of 120 seconds (3600s for DH1047 for the single cycle kinetics) at a flow rate of 50 μL/min was used. The surface was regenerated after each dissociation phase with 3 pulses of a 50 mM NaH+IM NaCl solution for 10 s at 100 pL/min. For the RBDs, the antibodies were captured on a CM5 chip (Cytiva. MA) coated with Human Anti-Fc (using Cytiva Human Antibody Capture Kit and protocol), by flowing over 100 nM antibody solution at a flowrate of 5 L/min for 120s. The RBDs were then injected at 100 nM for 120 s at a flowrate of 50 μL/min with a dissociation time of 30 s. The surface was regenerated by 3 consecutive pulse of 3M MgCl₂ for 10s at 100 μL/min. Sensorgram data were analyzed using the BiaEvaluation software (Cytiva, MA).

[0597] ELISA assays. Spike ectodomains tested for antibody- or ACE2-binding in ELISA assays as previously described (58). Assays were run in two formats i.e., antibodies/ACE2 coated, or spike coated. For the first format, the assay was performed on 384-well plates coated at 2 μg/ml overnight at 4° C., washed, blocked and followed by two-fold serially diluted spike protein starting at 25 μg/mL. Binding was detected with polyclonal anti-SARS-COV-2 spike rabbit serum (developed in our lab), followed by goat anti-rabbit-HRP (Abcam, Ab97080) and TMB substrate (Sera Care Life Sciences, MA). Absorbance was read at 450 nm. In the second format, serially diluted spike protein was bound in wells of a 384-well plates, which were previously coated with streptavidin (Thermo Fisher Scientific, MA) at 2 μg/mL and blocked. Proteins were incubated at room temperature for 1 hour, washed, then human mAbs were added at 10 μg/ml. Antibodies were incubated at room temperature for 1 hour, washed and binding detected with goat anti-human-HRP (Jackson ImmunoResearch Laboratories, PA) and TMB substrate.

### Example 8 a Broadly Cross-Reactive and Neutralizing Antibody Protects Against Sarbecovirus Challenge in Mice

[0598] SARS-COV in 2003 and SARS-COV-2 variants of concern (VOC) can cause deadly infections, underlining the importance of developing broadly effective countermeasures against sarbecoviruses, which can be key in the prevention and mitigation of current and future zoonotic events. Here, we demonstrate the neutralization of SARS-COV, bat CoVs WIV-1, RsSHC014, and SARS-COV-2 variants D614G, B.1.1.7, B.1.351, P.1, B. 1.429, B. 1.526, B.1.617.1, and B.1.617.2 by a receptor-binding domain (RBD) human antibody DH1047. Prophylactic and therapeutic treatment with DH1047 demonstrated efficacy against SARS-CoV, WIV-1, RsSHC014, and SARS-COV-2 B.1.351 infection in mice. Binding and structural analysis showed high affinity binding of DH1047 to an epitope that is highly conserved among sarbecoviruses. Thus, DH1047 is a broadly protective antibody that can prevent infection and mitigate outbreaks caused by SARS-related strains and SARS-COV-2 variants. Our results argue that the conserved RBD epitope bound by DH1047 is a rational target for a universal Sarbecovirus vaccine.

[0599] The emergence of severe acute respiratory syndrome coronavirus (SARS-COV) in 2003 led to more than 8.000 infections and 800 deaths (1. 2). In 2019. SARS-COV-2 emerged in Wuhan. China (3). The spread of SARS-COV-2, the virus that causes coronavirus disease of 2019 (COVID-19) was rapid. By March 2020, the World Health Organization (WHO) had declared the SARS-COV-2 outbreak a global pandemic. By August 2021, more than 200 million people had been infected globally, resulting in >4.5 million deaths with the documented emergence of several SARS-COV-2 variants which can partially evade host immunity. Therefore, there is a need to develop safe and effective broad-spectrum countermeasures that can prevent the rapid spread and attenuate the severe disease outcomes associated with current and future SARS-related virus emergence events.

[0600] Highly pathogenic CoV outbreaks in humans can be of bat origin (4), and there is great genetic diversity among bat SARS-related viruses (5). Zoonotic CoVs of bat origin, such as RsSHC014 and WIV-1, can utilize the human ACE2 receptor for cell entry and infect human airway cells (6. 7), underlining their potential for emergence in naïve human populations. Moreover, existing therapeutic monoclonal antibodies against SARS-COV, and SARS-COV-2 mRNA vaccines do not fully protect against zoonotic SARS-related virus infection in vivo (6-8). Given the pandemic potential of SARS-related viruses, the development of broadly effective countermeasures, such as universal vaccination strategies (8-10), and coronavirus (CoV) cross-reactive monoclonal antibodies is a global health priority. Moreover, given the emergence of the SARS-COV-2 variants that are partially or fully resistant to some neutralizing antibodies authorized for COVID-19 treatment (11-14), there is a need to develop mAb therapies that are broadly effective against the SARS-COV-2 variants and zoonotic SARS-related viruses that may emerge in the future.

[0601] The receptor binding domain (RBD) of SARS-COV-2 is one of the targets for highly potent neutralizing antibodies. Despite the high degree of genetic diversity within the RBD in SARS-related viruses (5), antibodies can be engineered to recognize diverse SARS-related viruses. Rappazzo et al, recently reported that an engineered RBD-directed antibody. ADG-2, neutralized SARS-related viruses and protected against SARS-COV and wild type SARS-COV-2 (15). Therefore, the RBD of sarbecoviruses contains conserved epitopes that are the target of broadly neutralizing antibodies. In agreement with the notion that the RBD contains a conserved epitope shared among SARS. SARS-related. SARS-COV-2 and the variants, we have identified a CoV cross-reactive RBD protective antibody: DH1047 (16). Here, we demonstrate, using both pseudoviruses and live virus assays, that DH1047 neutralizes SARS-CoV. SARS-related bat viruses RsSHC014 and WIV-1, and all tested SARS-COV-2 variants of concern. Structural analysis with SARS-COV spike shows that DH1047 targets a highly conserved RBD region among the sarbecoviruses. We demonstrate that DH1047 provides prophylactic and therapeutic protective activity against pathogenic SARS-COV, RsSHC014, WIV-1, and SARS-COV-2 B.1.351 variant in mice. Thus, DH1047 is a pan-group 2B CoV protective antibody that can be used to prevent or treat SARS-COV-2 infections including variants of concern and has the potential to prevent disease from a future outbreak of a pre-emergent, zoonotic SARS-related virus strains that jump into naïve animal and human populations.

### Results

### The Identification of Broadly Cross-Binding and Neutralizing Antibodies

[0602] We previously isolated 1737 monoclonal antibodies (mAbs) from a SARS-COV convalescent patient 17 years following infection and a SARS-COV-2 convalescent patient from 36 days post infection (16). From this large panel of mAbs previously described by Li et al, we focused on 50 cross-reactive antibodies that bound to SARS-COV, SARS-COV-2, and other human and animal CoV antigens from genetically distinct sarbecoviruses. Importantly, sarbecoviruses vary in their ability to utilize human ACE2 and exhibit substantial genetic diversity in their RBDs (FIG. 67A) (16).

[0603] To examine if these 50 cross-neutralizing mAbs neutralized pandemic and zoonotic sarbecoviruses, we measured neutralizing activity against a SARS-COV-2 2AA Q498Y/P499T spike mutations in the mouse-adapted (MA) virus, SARS-COV, bat CoV WIV-1, and bat CoV RsSHC014 using live viruses, and found four broadly cross-reactive antibodies, DH1235, DH1073, DH1046, and DH1047 (FIG. 67).

[0604] We focused our analyses on these four antibodies as they had broad neutralization. DH1235 neutralized SARS-COV-2 2AA MA, SARS-COV, and bat CoV WIV-1 with IC50 of 0.122, 0.0403, and 0.060 ug/ml, respectively (FIG. 67B and FIG. 82). DH1073 neutralized SARS-COV-2 2AA MA, SARS-COV, bat CoV WIV-1, and bat RsSHC014 with IC50 of 0.808, 0.016, 0.267, and 1.32 ug/ml, respectively (FIG. 67C and FIG. 82). DH1046 neutralized SARS-CoV-2 2AA MA, SARS-COV, bat CoV WIV-1, and bat CoV RsSHC014 with IC50 of 2.85, 0.103, 0.425, and 1.27 ug/ml, respectively (FIG. 67D and FIG. 82). DH1047 was the most potent, and neutralized SARS-COV-2 2AA MA, SARS-COV, bat CoV WIV-1, and bat CoV RsSHC014 with IC50 of 0.397, 0.028, 0.191, and 0.200 μg/ml, respectively (FIG. 67E and FIG. 82). As our study goal was to characterize the protective efficacy of cross-reactive antibodies, we compared the neutralization activity of DH1047 to two other mAbs currently in clinical trials: the cross-reactive ADG-2 (Adagio Therapeutics Inc-Adimab) and the potent REGN 10933 (Regeneron Pharmaceuticals) against SARS-COV-2 B.1.351. SARS-COV urbani, and RsSHC014 (FIG. 72) ADG-2 was engineered for increased potency whereas DH1047 was not (15). REGN 10933 had reduced neutralizing activity against SARS-COV-2 B.1.351 compared to both ADG-2 and DH1047 (FIG. 72). Like DH1047, ADG-2 effectively neutralized SARS-CoV urbani whereas REGN 10933 did not. Last, both ADG-2 and DH1047 neutralized RsSHC014 whereas REGN 10933 did not (FIG. 72).

[0605] To focus our screen on the four broadly neutralizing mAbs, we measured binding responses for DH1235, DH1073, DH1046, and DH1047 against other zoonotic bat spikes including RaTG13-CoV, bat RsSHC014, and Pangolin GXP4L-CoV spikes. DH1235, DH1073. DH1046, and DH1047 mAbs showed strong binding to bat RaTG13-CoV, bat RsSHC014, and pangolin GXP4L-COV spikes in addition to SARS-COV and SARS-COV-2 (FIG. 68A-68D). DH1235, DH1073, DH1046, and DH1047 bound to SARS-COV-2 RBD and did not bind to the SARS-COV-2 NTD. While DH1235. DH1073, DH1046, and DH1047 were cross-reactive against epidemic, pandemic, and zoonotic sarbecovirus spikes, they did not bind to MERS-COV. HuCoV OC43. HuCoV NL63, or HuCoV 229E spike proteins (FIG. 73), indicating these mAbs recognize a conserved epitope found only in Group 2B betacoronaviruses.

[0606] To examine if these cross-reactive mAbs shared any overlap in their epitopes, we examined their binding footprint via both negative stain electron microscopy (NSEM) and surface plasmon resonance (SPR). DH1047 had an overlap with DH1235 but not with DH1073 and had different angles of approach to the SARS-COV-2 spike (FIGS. 74A, 74B, and 74C). Moreover, from SPR competition experiments, DH1047, DH1046, and DH1235 were outcompeted by one another (FIG. 74D), whereas DH1073 was not, indicating that DH1073 targets a distinct non-cross-competing epitope. As DH1047 was the most potent mAb out of the four cross-reactive mAbs in our screen, we also performed NSEM, and observed binding of DH1047 to the RBD of bat RsSHC014 and SARS-COV spike ectodomains, with overall similar orientations as was observed for DH1047 binding to the SARS-COV-2 spike ectodomain (FIG. 75) (16).

[0607] A 3.20 A cryo-EM structure of DH1047 bound to the SARS-COV spike showed three DH1047 Fab bound to each of the 3 RBD of the ectodomain in the “up” position (1 Fab: 1 RBD ratio) (FIG. 68E, FIG. 76 and FIG. 83). DH1047 binding to the SARS-COV RBD involved interactions between the antibody HCDR3 and residues 356-372 of the RBD, and of the LCDR1 and LCDR3 regions with the RBD region spanning residues 390-404. The LCDR3 also interacted with RBM residues 488-492. The angle of approach and footprint of DH1047 on the SARS-COV RBD closely resembled that in the SARS-COV-2 complex (16) with steric overlap predicted with ACE2 binding (FIG. 68E). These results demonstrate that DH1047 binds to SARS-COV and SARS-COV-2 spike ectodomains by involving homologous interactions (FIG. 68F), consistent with our analysis of RBD sequence variability that showed a high degree of convergence of the DH1047 epitope (FIG. 68F) (10), thereby defining an RBD conserved site of vulnerability in sarbecoviruses.

[0608] We also defined the binding affinity of DH1047 against epidemic and zoonotic spike proteins. We measured binding on and off rates against both SARS-COV and RsSHC014-CoV spike proteins via SPR. DH1047 bound to the SARS-COV and RsSCH014-COV spikes with high affinity, association rates (>8.60 X10+M-'s-′) and dissociation rates (<1.0X10″ s′″) (FIG. 77), demonstrating that DH1047 binds tightly to both the epidemic SARS-COV and pre-emergent bat CoV spike proteins. Finally, DH1235, DH1073, DH1046, and DH1047 exhibited medium to long heavy-chain-complementarity-determining-region 3 (HCDR3) lengths and variable nucleotide somatic mutation rates in the heavy chain genes. DH1235. DH1073, and DH1046, had HCDR3 lengths of 21, 15, and 24, and nucleotide somatic hypermutation (SMH) rates of 1.7. 9.0, and 4 7, respectively (FIG. 84). The most potent neutralizing antibody DH1047 had HCDR3 lengths and SMH rates of 24 and 8.05, respectively (FIG. 84).

### The Protective Activity of DH1235, DH1073, DH1046, and DH1047 Against SARS-CoV

[0609] To define the protective efficacy of these four cross-reactive and broadly neutralizing RBD-specific IgG bNAbs, we passively immunized aged mice with DH1235, DH1073, DH1046, DH1047 and a negative control influenza mAb, CH65 (17), at 10 mg/kg 12 hours prior to infection and evaluated lung viral titer replication. Demonstrating a disconnect between in vitro and in vivo protection, neither DH1235, DH1073, nor DH1046 protected against SARS-COV mouse-adapted passage 15 (MA15) challenge in mice and all had lung viral replication comparable to that of control mice (FIG. 69A). In contrast, prophylactic administration of DH1047 fully protected mice from lung viral titer replication (FIG. 69A).

[0610] Given the prophylactic potential of DH1047, we sought to also evaluate its therapeutic potential in a highly stringent aged mouse model. We treated mice with control mAb or DH1047 at 10 mg/kg either at 12 hours before or 12 hours post infection with SARS-COV MA15 and monitored mice for signs of clinical disease, including weight loss, pulmonary function, which was measured by whole-body plethysmography (Buxco), through day 4 post infection (4 dpi). In agreement with the SARS-COV MA15 experiments, prophylactic treatment with DH1047 protected mice from weight loss through 4 dpi (FIG. 69B) and lung viral replication (FIG. 69C).

[0611] We also evaluated if the prophylactic and therapeutic administration of DH1047 protected against lung pathology as measured by 1) lung discoloration, which is a visual metric of gross lung damage taken at the time of the necropsy, 2) microscopic evaluation as measured by an acute lung injury (ALI) scheme, and 3) a diffuse alveolar damage (DAD) scheme. ALI and DAD, which are characterized by histopathologic changes including alveolar septal thickening, protein exudate in the airspace, hyaline membrane formation, and neutrophils in the interstitium or alveolar sacs, were both blindly evaluated by a board-certified veterinary pathologist blinded to the groups.

[0612] The prophylactic administration of DH1047 resulted in complete protection from macroscopic lung discoloration (FIG. 69D) and microscopic lung pathology as measured by ALI (FIG. 69E and FIG. 78) and DAD (FIG. 69F and FIG. 78). Similarly, DH1047 therapy at 12 hours post infection resulted in reduced lung viral titers (FIG. 69C and FIG. 78) as well as the macroscopic lung damage measured by the lung discoloration score (FIG. 69D and FIG. 78). In contrast to the prophylactic treatment condition, therapeutic administration of DH1047 did not significantly reduce microscopic lung pathology compared to control mice as measured by ALI (FIG. 69E and FIG. 78) and DAD (FIG. 69F and FIG. 78) in this highly vulnerable model for SARS-COV pathogenesis. The prophylactic and therapeutic administration of DH1047 prevented degradation of pulmonary function compared to controls (FIG. 69G). Both the prophylactic and therapeutic administration of DH1047 resulted in complete survival whereas only 50% of control mice survived (FIG. 69H). Thus, DH1047 can prevent SARS-COV disease when administered prophylactically and has measurable therapeutic benefits in highly susceptible aged mouse models.

[0613] The prophylactic and therapeutic activity of DH1047 against bat pre-emergent CoVs and in vitro neutralization activity against the SARS-COV-2 variants

[0614] As DH1047 neutralized both WIV-1 and RsSHC014 (FIG. 67), we sought to define if DH1047 had prophylactic and therapeutic efficacy in mice against these pre-emergent bat CoVs. We administered DH1047 prophylactically 12 hours before infection and therapeutically 12 hours post infection at 10 mg/kg in mice infected with bat CoVs. Importantly, the prophylactic administration of DH1047 completely protected mice from WIV-1 lung viral replication and reduced lung viral titers in therapeutically treated mice compared to control mice (FIG. 70A).

[0615] Similarly, the prophylactic administration of DH1047 completely protected mice from RsSHC014 lung viral replication and significantly reduced viral replication to near undetectable levels in therapeutically treated mice (FIG. 70B). While we previously demonstrated the prophylactic and therapeutic efficacy of DH1047 against the SARS-COV-2 Wuhan isolate in cynomolgus macaques (16), which exhibit mild SARS-COV-2 disease (18), it was not known if the mutations present in the newly emerging SARS-COV-2 variants will ablate the neutralizing activity of DH1047. We therefore evaluated if DH1047 can neutralize the prevalent variants of concern (VOCs) using both pseudovirus and live virus neutralization assays. DH1047 neutralized all tested variants of concern including SARS-COV-2 D614G, B.1.1.7 (Alpha), B.1.351 (Beta), P.1 (Gamma), B.1.429, B.1.526, B.1.617.1 (Kappa), and B.1.617.2 (Delta) (FIG. 70C and FIG. 70D). Impressively, the PsVNA50 values against all the variants ranged between 0.1214-0.1609 mg/ml confirming across the board and demonstrated neutralization of SARS-COV-2 VOCs by mAb DH1047 (FIG. 70D). Live virus neutralization also demonstrated the broadly neutralizing activity of DH1047 with IC50 values against D614G, B.1.1.7, and B.1.351 were 0.059, 0.081, and 0.111 ug/ml, respectively.

### The Prophylactic and Therapeutic Activity of DH1047 Against SARS-COV-2 B.1.351 in Mice

[0616] Given that the B.1.351 variant is more resistant to both vaccine-elicited neutralizing antibodies (13. 19), and completely ablates the neutralizing activity of the Eli Lily therapeutic monoclonal antibody LY-CoV555 (II), we also sought to evaluate if DH1047 had both prophylactic and therapeutic efficacy against SARS-COV-2 B.1.351 in mice. We again utilized a highly susceptible and vulnerable aged mouse model in the SARS-COV-2 B.1.351 protection experiments. Consistent with the SARS-COV, WIV-1, and RsSHC014 in vivo data, the prophylactic administration of DH1047 mediated complete protection against severe weight loss following SARS-COV-2 B.1.351 challenge in aged mice (FIG. 71A).

[0617] In contrast, we did not observe differences in weight loss after the therapeutic administration of DH1047 as compared to controls (FIG. 71A). Mice prophylactically treated with DH1047 had undetectable levels of SARS-COV-2 B.1.351 lung viral replication (FIG. 71B) and were also completely protected from macroscopic lung pathology compared to controls (FIG. 71C). Therapeutic administration of DH1047 resulted in a significant reduction in lung viral titers compared to control (FIG. 71B). We also evaluated the microscopic lung pathology as measured by ALI (FIG. 71D) and DAD scoring schemes (FIG. 71E) in this highly susceptible aged model for SARS-COV-2 B.1.351 pathogenesis. Importantly, the prophylactic administration of DH1047 significantly protected mice from lung histopathology as measured by ALI and DAD compared to control mice.

[0618] Additionally, we observed a reduction in ALI by the therapeutic administration of DH1047 as measure by macroscopic lung pathology (FIG. 71C) and lung histopathology by ALI (FIG. 71D). Finally, there was no difference in mortality in the SARS-COV-2 B.1.351 challenge model in the control and DH1047-treated mice (FIG. 71F). Therefore, DH1047 can prevent and treat SARS-COV-2 infections with the B.1.351 variant of concern in vivo. To determine the concentration at which we observe breakthrough infection in vivo we performed a dose de-escalation study and treated mice prophylactically at 10, 5, and 1 mg/kg. We observed full protection at 10 but not at 5 mg/kg as measured by weight loss and lung discoloration, despite full protection lung viral replication compared to control (FIG. 71G, 71J, 711). In contrast, incomplete protection from weight loss, breakthrough viral lung replication, and lung pathology was observed at the 1 mg/kg prophylaxis dose of DH1047 (FIG. 71G, 71J, 71I).

### Structural Comparison of DH1047 to Other Antibodies Targeting the RBD

[0619] Comparing the DH1047 epitope with that of representative RBD-directed antibodies from Class 1, 2, 3 and 4 (20), we found that the DH1047 footprint overlapped with antibody C105 (Class 1) and CR3022 (Class 4) (FIG. 71J and FIG. 79). The DH1047 footprint on the RBD showed similarity with Ab H014 (27) and overlapped with the footprint of other antibodies whose epitopes overlap with that of CR3022 (22-24). Interestingly, single domain antibodies, or nanobodies, that potently neutralize SARS-COV-2 show a close overlap with the DH1047 VH domain (FIG. 79).

[0620] Nanobody VHH V shows the closest overlap with its elongated HCDR3 loop binding to a similar RBD region as the HCDR3 of DH1047. We performed alanine scanning mutagenesis of the DH1047 HCDR3 residues proximal to the RBD epitope (FIG. 80). Mutating residue Trp 100B to Ala did not alter its binding to the SARS-COV-2 2P S ectodomain, consistent with the orientation of the Trp side chain away from the epitope. Similarly, mutating residues Ser100A and Ser100C to Ala did not alter binding. Ala mutants of residues Leu 100G and Asp 10OF notably reduced DH1047 binding to the S protein even though these residues did not directly contact the RBD, without wishing to be bound by theory disrupting the conformation of the long HCDR3 loop. Mutagenesis of the LCDR3 similarly resulted in notable reduction in binding observed for Tyr91Ala and Arg96Ala substitutions, although neither of these residues directly contacted the RBD. Reduction in binding was also observed for Ala substitution of residue Leu94 where the Leu side chain occupied a hydrophobic pocket formed by the heavy chain residues Leu100G and Ile58, and RBD residue Val394.

[0621] The DH1047 epitope also overlaps with that of antibody ADG-2 previously shown to neutralize SARS-related viruses and protecting against SARS-COV and SARS-COV-2 (15). The approach angles of DH1047 and ADG-2 differ, with a rotation about the Fab longitudinal axis pivoting the ADG-2 antibody more towards the ACE2 binding region compared to DH1047 (FIGS. 81A and 81B). In contrast to ADG-2 which uses VH3-21 for its heavy chain and has a 17 amino acid long HCDR3, DH1047 uses VH1-46 and has a 24 amino acid long HCDR3 (FIG. 84) (15). To compare the therapeutic efficacy of DH1047 against ADG-2, we performed a head-to-head prophylaxis and therapy comparison study. Aged mice were therapeutically treated with either DH1047, ADG-2, or CH65 control mAbs at 10 mg/kg at 6 hours post infection with SARS-COV-2 B.1.351. Mice treated with either DH1047 or ADG-2 were completely protected from weight loss, lung viral replication, and lung damage compared to controls (FIG. 81C), indicating that DH1047 has similar in vivo therapeutic profiles to ADG-2, which is another potent cross-protective mAb (15).

### DISCUSSION

[0622] The emergence of SARS-COV and SARS-COV-2 in the last two decades underscores a critical need to develop broadly effective countermeasures against sarbecoviruses. Moreover, with the recent emergence of the more transmissible (25), modestly more virulent (26) B. 1.1.7 variant (Alpha), B.1.351 (Beta), B.1.1.28 (Gamma), and the highly transmissible B.1.617.2 variant (Delta), all of which can partially evade existing countermeasures (11. 13. 27), there is a need to develop next-generation mAb therapeutics that can broadly neutralize these variants, as well as future variants of concern. For example, the SARS-COV-2 B.1.351 variant completely ablates the neutralization activity of the mAb LY-CoV555 (11. 12). As a result, the emergency use authorization (EUA) of LY-CoV555 was recently rescinded by the U.S. Food and Drug Administration (FDA). In addition, the presence of the E484K mutation in many variants of concern, severely dampens the neutralization activity by more than 6-fold of the AstraZeneca COV2-2196 mAb, Brii BioSciences mAb Brii-198, and the Regeneron mAb REGN 10933 (12. 13).

[0623] In addition to evading currently monoclonal antibody therapeutics, some of the variants including B. 1.351 can diminish the efficacy of clinically approved vaccines, including the Johnson & Johnson single-dose vaccine and the AstraZeneca ChAd0×1 (28. 29). Furthermore, some monoclonal antibodies isolated from vaccine recipients of the Moderna and Pfizer vaccines also demonstrated reduced efficacy against mutations present in the variants (30). Therefore, current vaccine and mAb therapies must be monitored in real time to define the performance of existing therapies against newly emerging and spreading variants. In the setting of reduced vaccine efficacy, the deployment of effective mAb therapies against the variants, such as DH1047, can be a strategy to help control the COVID-19 pandemic.

[0624] The development of universal vaccination strategies against sarbecoviruses will be improved by the identification and characterization of broadly protective and conserved epitopes across SARS-related virus strains. Recent studies described broadly reactive antibodies that target the subunit 2 (S2) portion of the spike protein (31-34). While the broad recognition of these S2-specific antibodies is encouraging, these antibodies weakly neutralized diverse CoVs. Given the limited characterization of these mAbs, it is unclear if these S2-specific mAbs are broadly protective in vivo against diverse epidemic and zoonotic pre-emergent CoVs. In contrast, RBD-specific antibody, S2X259, neutralized SARS-COV-2 variants and zoonotic SARS-related viruses, as measured by pseudovirus neutralization (35).

[0625] Similarly, a recent subset of RBD-specific cross-reactive mAbs also showed in vitro activity (36), although their in vivo breadth and protective efficacy against divergent sarbecoviruses remains unconfirmed. In contrast to DH1047, neither DH1235, DH1073, nor DH1046 fully protected against SARS-COV infection in aged mice, without wishing to be bound by theory, because these cross-reactive mAbs may have differences in their mechanisms of protection in vivo. While it is not clear why these mAbs have in vivo protection differences, without wishing to be bound by theory, they have differences in their angle of approach to the spike and/or require optimal Fc effector functions or may have stability differences in vivo.

[0626] DH1047 had broad protective in vivo efficacy against pre-emergent SARS-related viruses, epidemic SARS-COV, SARS-COV-2 B.1.351 variant, and neutralized all tested SARS-CoV-2 variants including the delta variant, underscoring that DH1047 recognizes a pan Sarbecovirus neutralizing epitope. Consistent with this notion, we have described a SARS-CoV-2 RBD-ferritin nanoparticle vaccine that elicited neutralizing antibodies against pre-emergent SARS-related viruses and protected against SARS-COV-2 challenge in monkeys (10). The serum antibody responses in these SARS-COV-2 RBD-ferritin nanoparticle-vaccinated monkeys can block DH1047 binding responses against SARS-COV-2 spike proteins, indicating that SARS-COV-2 RBD vaccines elicit DH1047-related antibody responses and can potentially protect against the future emergence of SARS- or SARS2-related viruses. As with other broad Sarbecovirus vaccine formulations and a recent study which reported broad neutralization of sarbecoviruses in SARS convalescent patients fully immunized with SARS-COV-2 mRNA vaccines (8. 37), and it will be interesting to examine if these vaccines and individuals generate DH1047-like neutralizing antibodies.

[0627] Moving forward, it will be critical to closely monitor SARS- and SARS2-related viruses of zoonotic origin and actively monitor if broad-spectrum antibodies like ADG-2, DH1047, and S2X259 retain their inhibitory activity against pre-emergent viruses. Embodiments comprise a system in which broad-spectrum antibodies like DH1047 can be tested for safety in small Phase I clinical trials so that if a future SARS-related virus emerges, DH1047 can immediately be tested in larger efficacy trials at the site of an outbreak to potentially prevent the rapid spread of an emergent CoV. Moreover, given that DH1047 neutralized all tested SARS-COV-2 variants including the highly transmissible B.1.617.2 (Delta), this mAb can also be deployed now to help curb the COVID-19 pandemic. Like other therapeutic antibodies evaluated against COVID19 infections, our data argue that early administration will prove critical for protecting against severe disease outcomes (38). We conclude that DH1047 is a broadly protective mAb that has efficacy against pre-emergent, zoonotic SARS-related viruses from different clades, neutralizes highly transmissible SARS-CoV-2 VOCs, and protects against SARS-COV-2 B. 1.351.

### Methods

### Antibody Isolation

[0628] Antibodies were isolated from antigen-specific single B cells as previously described from an individual who had recovered from SARS-COV-1 infection 17 years prior to leukapheresis, and from a SARS-COV-2 convalescent individual from 36 days post infection (16).

### Measurement of CoV Spike Binding by ELISA

[0629] Indirect binding ELISAs were conducted in 384 well ELISA plates (Costar #3700) coated with 2 ug/ml antigen in 0.1M sodium bicarbonate overnight at 4° C., washed and blocked with assay diluent (1XPBS containing 4% (w/v) whey protein/15% Normal Goat Serum/0.5% Tween-20/0.05% Sodium Azide), mAbs were incubated for 60 minutes in three-fold serial dilutions beginning at 100 ug/ml followed by washing with PBS/0.1% Tween-20. HRP conjugated goat anti-mouse IgG secondary antibody (SouthernBiotech 1030-05) was diluted to 1:10,000 in assay diluent without azide, incubated at for 1 hour at room temperature, washed and detected with 20 μl SureBlue Reserve (KPL 53-00-03) for 15 minutes. Reactions were stopped via the addition of 20 μl HCL stop solution. Plates were read at 450 nm. Area under the curve (AUC) measurements were determined from binding of serial dilutions.

### Measurement of Neutralizing Antibodies Against Live Viruses

[0630] Full-length SARS-COV-2 Seattle. SARS-COV-2 D614G. SARS-COV-2 B.1.351. SARS-COV-2 B.1.1.7. SARS-COV. WIV-1, and RsSHC014 viruses were designed to express nanoluciferase (nLuc) (8). Virus titers were measured in Vero E6 USAMRIID cells, as defined by plaque forming units (PFU) per ml, in a 6-well plate format in quadruplicate biological replicates for accuracy. For the 96-well neutralization assay. Vero E6 USAMRID cells were plated at 20.000 cells per well the day prior in clear bottom black walled plates. Cells were inspected to ensure confluency on the day of assay, mAbs were serially diluted 3-fold up to nine dilution spots at specified concentrations. Serially diluted mAbs were mixed in equal volume with diluted virus. Antibody-virus and virus only mixtures were then incubated at 37° C. with 5% CO₂ for one hour. Following incubation, serially diluted mAbs and virus only controls were added in duplicate to the cells at 75 PFU at 37° C., with 5% CO₂. After 24 hours, cells were lysed, and luciferase activity was measured via Nano-Glo Luciferase Assay System (Promega) according to the manufacturer specifications. Luminescence was measured by a Spectramax M3 plate reader (Molecular Devices. San Jose, CA). Virus neutralization titers were defined as the sample dilution at which a 50% reduction in RLU was observed relative to the average of the virus control wells.

### Lentivirus Pseudovirus Neutralization Assay (PsVNA)

[0631] Antibody preparations were evaluated by SARS-COV-2 pseudovirus 50% neutralization assay (PsVNA50)) using WA-1 strain. B.1.1.7 (with spike mutations: H69-V70del. Y144del. N501Y. A570D. D614G. P681H. T716I. S982 Å, and D1118H). B. 1.429 (with spike mutations S13I. W152C. L452R. D614G). B.1.526 (with spike mutations L5F. T95I. D253G. E484K or S477N. D614G. A701V). P.1 (with spike mutations L18F. T20N. P26S. D138Y. R190S. K417T. E484K. N501Y. H655Y. T1027I. D614G. V1176F). B.1.351 (with spike mutations L18F. D80 Å. D215G. L242-244del. K417N. E484K. N501Y. D614G, and A701V). B.1.617.1 (with spike mutations G142D. E154K. V382L. L452R. E484Q. P681R. Q1071H. D1153Y) and B. 1.617.2 (with spike mutations T19R. G142D. E156del. F157del. R158G, L452R. T478K. D614G. P681R. D950N). The PsVNA using 293-ACE2-TMPRSS2 cell line was described previously (39. 40). Controls included cells only, virus without any antibody and positive sera. The cut-off value or the limit of detection for the neutralization assay is 1:10 dilution.

### Surface Plasmon Resonance

[0632] Kinetic measurements of the DH1047 Fab binding to SARS-COV and RsSHC014 spike proteins were obtained using a Biacore S200 instrument (Cytiva, formerly GE Healthcare) in HBS-EP+1× running buffer. The spike proteins were first captured onto a Series S Streptavidin chip to a level of 300-400 for the SARS-COV spike proteins and 850-1000RU for the RsSHC014 spike protein. The DH1047 Fab was diluted from 2.5 to 200 nM and injected over the captured CoV spike proteins using the single cycle kinetics injection type at a flow rate of 50 μL/min. There were five 120s injections of the Fab at increasing concentrations followed by a dissociation of 600s after the final injection. After dissociation, the spike proteins were regenerated from the streptavidin surface using a 30s pulse of Glycine pH1.5. Results were analyzed using the Biacore S200 Evaluation software (Cytiva). A blank streptavidin surface along with blank buffer binding were used for double reference subtraction to account for non-specific protein binding and signal drift. Subsequent curve fitting analyses were performed using a 1:1 Langmuir model with a local Rmax for the DH1047 Fab. The reported binding curves are representative of 2 data sets.

### Protein Expression and Purification for EM Studies

[0633] The SARS-COV spike ectodomain construct comprised the residues 1 to 1190 (UniProt P59594-1) with proline substitutions at 968-969, a C-terminal T4 fibritin trimerization motif, a C-terminal HRV3C protease cleavage site, a TwinStrepTag and an 8XHisTag. The construct was cloned into the mammalian expression vector paH (41). The RsSHC014 spike ectodomain construct was prepared similarly, except it also contained the 2P mutations that placed two consecutive proline at the HRI-CH junction at residue positions 986 and 987. FreeStyle 293F cells were used for the spike ectodomain production. Cells were maintained in FreeStyle 293 Expression Medium (Gibco) at 37° C., and 9% CO₂, with agitation at 120 rpm in a 75% humidified atmosphere. Transfections were performed as previously described (42. 43) using Turbo293 (SpeedBiosystems). 16 to 18 hours post transfection, HyClone CDM4HEK293 media (Cytiva. MA) was added. On the 6th day post transfection, spike ectodomain was harvested from the concentrated supernatant. The purification was performed using StrepTactin resin (IBA LifeSciences) and size exclusion chromatography (SEC) on a Superose 6 10/300 GL Increase column (Cytiva, MA) in 2 mM Tris, pH 8.0, 200 mM NaCl, 0.02% NaN3. All steps were performed at room temperature and the purified spike proteins were concentrated to 1-5 mg/ml, flash frozen in liquid nitrogen and stored at −80° C., until further use.

[0634] DH1047 IgG was produced in Expi293F cells maintained in Expi293 Expression Medium (Gibco) at 37° C., 120 rpm, 8% CO₂ and 75% humidity. Plasmids were transfected using the ExpiFectamine 293 Transfection Kit and protocol (Gibco) (42. 44) and purified by Protein A affinity. The IgG was digested to the Fab state using LysC.

### Negative Stain Electron Microscopy (NSEM)

[0635] NSEM was performed as described previously (16). Briefly, Fab-spike complexes were prepared by mixing Fab and spike to give a 9: Imolar ratio of Fab to spike. Following a 1-hr incubation for 1 hour at 37° C., the complex was cross-linked by diluting to a final spike concentration of 0.1 mg/ml into room-temperature buffer containing 150 mM NaCl, 20 mM HEPES pH 7.4, 5% glycerol, and 7.5 mM glutaraldehyde and incubating for 5 minutes. Excess glutaraldehyde was quenched by adding sufficient 1 M Tris pH 7.4 stock to give a final concentration of 75 mM Tris and incubated for 5 minutes. Carbon-coated grids (EMS, CF300-cu-UL) were glow-discharged for 20s at 15 mA, after which a 5-μl drop of quenched sample was incubated on the grid for 10-15 s, blotted, and then stained with 2% uranyl formate. After air drying grids were imaged with a Philips EM420 electron microscope operated at 120 KV, at 82,000× magnification and images captured with a 2k x 2k CCD camera at a pixel size of 4.02 λ.

[0636] The RELION 3.0 program was used for all negative stain image processing Images were imported, CTF-corrected with CTFFIND, and particles were picked using a spike template from previous 2D class averages of spike alone. Extracted particle stacks were subjected to 2-3 rounds of 2D class averaging and selection to discard junk particles and background picks. Cleaned particle stacks were then subjected to 3D classification using a starting model created from a bare spike model, PDB 6vsb, low-pass filtered to 30 Å. Classes that showed clearly defined Fabs were selected for final refinements followed by automatic filtering and B-factor sharpening with the default Relion post-processing parameters.

### Cryo-EM

[0637] Purified SARS-COV-1 spike ectodomain was incubated for approximatively 2 hours with a 6-fold molar equivalent of the DH1047 Fab in a final volume of 10 μL. The sample concentration was adjusted to ˜1.5 mg/mL of spike in 2 mM Tris pH 8.0, 200 mM NaCl, and 0.02% NaN3. Before freezing, 0.1 μL of glycerol was added to the 10 μL of sample. A 2.4-uL drop of protein was deposited on a Quantifoil-1.2/1.3 grid (Electron Microscopy Sciences, PA) that had been glow discharged for 10 seconds using a PELCO easiGlow™ Glow Discharge Cleaning System. After a 30-second incubation in >95% humidity, excess protein was blotted away for 2.5 seconds before being plunge frozen into liquid ethane using a Leica EM GP2 plunge freezer (Leica Microsystems). Frozen grids were imaged using a Titan Krios (Thermo Fisher) equipped with a K3 detector (Gatan). Data processing was performed using cryoSPARC (45). Model building and refinement was done using Phenix (46. 47), Coot (48), Pymol (49), Chimera (50), ChimeraX (51) and Isolde (52). Similar to what we had observed for the DH1047 complex with the SARS-COV-2 spike ectodomain (16), there was considerable heterogeneity in the RBD region: further classification of particles was performed to better resolve the antibody binding interface, resulting in an asymmetric reconstruction of a population refined to a resolution of 3.4 A that was used for model fitting.

### Animals and Challenge Viruses

[0638] Eleven-month-old female BALB/c mice were purchased from Envigo (#047) and were used for the SARS-COV, SARS-COV-2 B.1.351, and RsSHC014-COV protection experiments. 8-10-week-old hACE2-transgenic mice (B6J.Cg-Tg (FOXJI-ACE2) | Rba/Mmnc) were bred at UNC Chapel Hill and were used for WIV-1-COV protection experiments. The study was carried out in accordance with the recommendations for care and use of animals by the Office of Laboratory Animal Welfare (OLAW), National Institutes of Health and the Institutional Animal Care and Use Committee (IACUC) of University of North Carolina (UNC permit no. A-3410-01). Animals were housed in groups of five and fed standard chow diets. Virus inoculations were performed under anesthesia and all efforts were made to minimize animal suffering. All mice were anesthetized and infected intranasally with 1×10⁴ PFU/ml of SARS-CoV MA15, 1×10⁴ PFU/ml of SARS-COV-2 B.1.351-MA10, 1 × 10+PFU/ml RsSHC014, 1×10⁴ PFU/ml WIV-1, which have been described previously (6. 53. 54). Mice were weighted daily and monitored for signs of clinical disease, and selected groups were subjected to daily whole-body plethysmography. For all mouse studies, groups of n=10 mice were included per arm of the study except for the hACE2-transgenic mice, which included n=5 mice per group due to a limited availability of these mice. Viral titers, weight loss, and histology were measured from individual mice per group.

### Lung Pathology Scoring

[0639] Acute lung injury was quantified via two separate lung pathology scoring scales: Matute-Bello and Diffuse Alveolar Damage (DAD) scoring systems. Analyses and scoring were performed by a board certified veterinary pathologist who was blinded to the treatment groups as described previously (55). Lung pathology slides were read and scored at 600× total magnification.

[0640] The lung injury scoring system used is from the American Thoracic Society (Matute-Bello) in order to help quantitate histological features of ALI observed in mouse models to relate this injury to human settings. In a blinded manner, three random fields of lung tissue were chosen and scored for the following: (A) neutrophils in the alveolar space (none=0), 1-5 cells =1, >5 cells =2), (B) neutrophils in the interstitial septa (none=0), 1-5 cells =1, >5 cells =2), (C) hyaline membranes (none=( ) one membrane=1, >1 membrane=2), (D) Proteinaceous debris in air spaces (none=( ) one instance=1, >1 instance=2), (E) alveolar septal thickening (<2× mock thickness=0), 2-4× mock thickness=1, >4× mock thickness=2). To obtain a lung injury score per field, A-E scores were put into the following formula

score=[(20×A)+(14×B)+(7×C)+(7×D)+(2×E)]/100.

This formula contains multipliers that assign varying levels of importance for each phenotype of the disease state. The scores for the three fields per mouse were averaged to obtain a final score ranging from ( ) to and including 1. The second histology scoring scale to quantify acute lung injury was adopted from a lung pathology scoring system from lung RSV infection in mice (56). This lung histology scoring scale measures diffuse alveolar damage (DAD). Similar to the implementation of the ATS histology scoring scale, three random fields of lung tissue were scored for the following in a blinded manner: 1=absence of cellular sloughing and necrosis, 2-Uncommon solitary cell sloughing and necrosis (1-2 foci/field), 3=multifocal (3+foci) cellular sloughing and necrosis with uncommon septal wall hyalinization, or 4-multifocal (>75% of field) cellular sloughing and necrosis with common and/or prominent hyaline membranes. The scores for the three fields per mouse were averaged to get a final DAD score per mouse. The microscope images were generated using an Olympus Bx43 light microscope and CellSense Entry v3.1 software.

### Biocontainment and Biosafety

[0641] Studies were approved by the UNC Institutional Biosafety Committee approved by animal and experimental protocols in the Baric laboratory. All work described here was performed with approved standard operating procedures for SARS-COV-2 in a biosafety level 3 (BSL-3) facility conforming to requirements recommended in the Microbiological and Biomedical Laboratories, by the U.S. Department of Health and Human Service, the U.S. Public Health Service, and the U.S. Center for Disease Control and Prevention (CDC), and the National Institutes of Health (NIH).

### Weblogo

[0642] As the interface in the SARS-COV-2/DH1047 complex was better resolved (16), we used this complex for visualizing epitope details and analyzing extent of conservation of the epitope residues in different sarbecoviruses. The Weblogo tool from UC Berkeley was used to generate the consensus epitopes of the DH1047 HCDR3 and LCDR3 epitopes. weblogo.berkeley.edu/logo.cgi. The following 23 Sarbecovirus genomes were used for the Weblogo analysis: KT444582, AY278554, AY278741, AY515512, AY525636, KC881005, KC881006, KF367457, MK211376, MN908947, MN996532, MG772933, MG772934, MK211374, DQ412042, DQ648856, MK211378, DQ022305, DQ412043, DQ648857, DQ071615, MK211375, MK211377.

[0643] Statistics: All statistical analyses were performed using GraphPad Prism 9.

### REFERENCES

[0644] 1. J. S. Peiris et al., Coronavirus as a possible cause of severe acute respiratory syndrome. Lancet 361, 1319-1325 (2003).
[0645] 2. J. D. Cherry, P. Krogstad, SARS: The First Pandemic of the 21st Century. Pediatric Research 56, 1-5 (2004).
[0646] 3. P. Zhou et al., A pneumonia outbreak associated with a new coronavirus of probable bat origin. Nature 579, 270-273 (2020).
[0647] 4. W. Li et al., Bats Are Natural Reservoirs of SARS-Like Coronaviruses. Science 310, 676-679 (2005).
[0648] 5. B. Hu et al., Discovery of a rich gene pool of bat SARS-related coronaviruses provides new insights into the origin of SARS coronavirus. PLOS Pathog 13, e1006698 (2017).
[0649] 6. V. D. Menachery et al., A SARS-like cluster of circulating bat coronaviruses shows potential for human emergence. Nat Med 21, 1508-1513 (2015).
[0650] 7. V. D. Menachery et al., SARS-like WIV1-COV poised for human emergence. Proc Natl Acad Sci USA 113, 3048-3053 (2016).
[0651] 8. D. R. Martinez et al., Chimeric spike mRNA vaccines protect against Sarbecovirus challenge in mice. Science, (2021).
[0652] 9. A. C. Walls et al., Elicitation of broadly protective sarbecovirus immunity by receptor-binding domain nanoparticle vaccines, bioRxiv, (2021).
[0653] 10. K. O. Saunders et al., Neutralizing antibody vaccine for pandemic and pre-emergent coronaviruses. Nature, (2021).
[0654] 11. L. Wang et al., Antibodies with potent and broad neutralizing activity against antigenically diverse and highly transmissible SARS-COV-2 variants, bioRxiv, (2021).
[0655] 12. P. Wang et al., Antibody resistance of SARS-COV-2 variants B.1.351 and B.1.1.7. Nature, (2021).
[0656] 13. R. E. Chen et al., Resistance of SARS-COV-2 variants to neutralization by monoclonal and serum-derived polyclonal antibodies. Nat Med, (2021).
[0657] 14. D. Li, G. D. Sempowski, K. O. Saunders, P. Acharya, B. F. Haynes, SARS-CoV-2 Neutralizing Antibodies for COVID-19 Prevention and Treatment. Annual Review of Medicine 73, null (2022).
[0658] 15. C. G. Rappazzo et al., Broad and potent activity against SARS-like viruses by an engineered human monoclonal antibody. Science 371, 823-829 (2021).
[0659] 16. D. Li et al., In vitro and in vivo functions of SARS-COV-2 infection-enhancing and neutralizing antibodies. Cell 184, 4203-4219.e4232 (2021).
[0660] 17. J. R. Whittle et al., Broadly neutralizing human antibody that recognizes the receptor-binding pocket of influenza virus hemagglutinin. Proc Natl Acad Sci USA 108, 14216-14221 (2011).
[0661] 18. S. R. Leist, A. Schäfer, D. R. Martinez, Cell and animal models of SARS-COV-2 pathogenesis and immunity. Dis Model Mech 13, (2020).
[0662] 19. D. Planas et al., Sensitivity of infectious SARS-COV-2 B.1.1.7 and B.1.351 variants to neutralizing antibodies. Nature Medicine, (2021).
[0663] 20. C. O. Barnes et al., SARS-COV-2 neutralizing antibody structures inform therapeutic strategies. Nature 588, 682-687 (2020).
[0664] 21. Z. Lv et al., Structural basis for neutralization of SARS-COV-2 and SARS-COV by a potent therapeutic antibody. Science 369, 1505-1509 (2020).
[0665] 22. L. Piccoli et al., Mapping Neutralizing and Immunodominant Sites on the SARS-COV-2 Spike Receptor-Binding Domain by Structure-Guided High-Resolution Serology. Cell 183, 1024-1042.e1021 (2020).
[0666] 23. H. Liu et al., Cross-neutralization of a SARS-COV-2 antibody to a functionally conserved site is mediated by avidity, bioRxiv, (2020).
[0667] 24. D. Zhou et al., Structural basis for the neutralization of SARS-COV-2 by an antibody from a convalescent patient. Nat Struct Mol Biol 27, 950-958 (2020).
[0668] 25. N. G. Davies et al., Estimated transmissibility and impact of SARS-COV-2 lineage B.1.1.7 in England. Science 372, eabg3055 (2021).
[0669] 26. N. G. Davies et al., Increased mortality in community-tested cases of SARS-CoV-2 lineage B.1.1.7. Nature, (2021).
[0670] 27. C. Liu et al., Reduced neutralization of SARS-COV-2 B.1.617 by vaccine and convalescent serum. Cell 184, 4220-4236.e4213 (2021).
[0671] 28. J. Sadoff et al., Safety and Efficacy of Single-Dose Ad26.COV2.S Vaccine against Covid-19. New England Journal of Medicine, (2021).
[0672] 29. S. A. Madhi et al., Efficacy of the ChAd0×1 nCOV-19 Covid-19 Vaccine against the B.1.351 Variant. New England Journal of Medicine, (2021).
[0673] 30. Z. Wang et al., mRNA vaccine-elicited antibodies to SARS-COV-2 and circulating variants. Nature, (2021).
[0674] 31. C. Wang et al., A conserved immunogenic and vulnerable site on the coronavirus spike protein delineated by cross-reactive monoclonal antibodies. Nature Communications 12, 1715 (2021).
[0675] 32. P. Zhou et al., A protective broadly cross-reactive human antibody defines a conserved site of vulnerability on beta-coronavirus spikes, bioRxiv, (2021).
[0676] 33. M. M. Sauer et al., Structural basis for broad coronavirus neutralization. bioRxiv, (2020).
[0677] 34. M. F. Jennewein et al., Isolation and Characterization of Cross-Neutralizing Coronavirus Antibodies from COVID-19+Subjects, bioRxiv, (2021).
[0678] 35. M. A. Tortorici et al., Structural basis for broad sarbecovirus neutralization by a human monoclonal antibody, bioRxiv, (2021).
[0679] 36. C. A. Jette et al., Broad cross-reactivity across sarbecoviruses exhibited by a subset of COVID-19 donor-derived neutralizing antibodies, bioRxiv, 2021.2004.2023.441195 (2021).
[0680] 37. C. W. Tan et al., Pan-Sarbecovirus Neutralizing Antibodies in BNT162b2-Immunized SARS-COV-1 Survivors. N Engl J Med, (2021).
[0681] 38. D. R. Martinez et al., Prevention and therapy of SARS-COV-2 and the B.1.351 variant in mice. Cell Reports.
[0682] 39. S. Ravichandran et al., Antibody signature induced by SARS-COV-2 spike protein immunogens in rabbits. Sci Transl Med 12, (2020).
[0683] 40. J. Tang et al., Antibody affinity maturation and plasma IgA associate with clinical outcome in hospitalized COVID-19 patients. Nat Commun 12, 1221 (2021).
[0684] 41. D. Wrapp et al., Cryo-EM structure of the 2019-nCOV spike in the prefusion conformation. Science 367, 1260-1263 (2020).
[0685] 42. R. Henderson et al., Controlling the SARS-COV-2 spike glycoprotein conformation. Nat Struct Mol Biol, (2020).
[0686] 43. R. J. Edwards et al., Cold sensitivity of the SARS-COV-2 spike ectodomain. Nature Structural & Molecular Biology 28, 128-131 (2021).
[0687] 44. W. B. Williams et al., Fab-dimerized glycan-reactive antibodies are a structural category of natural antibodies. Cell 184, 2955-2972.e2925 (2021).
[0688] 45. A. Punjani, J. L. Rubinstein, D. J. Fleet, M. A. Brubaker, cryoSPARC: algorithms for rapid unsupervised cryo-EM structure determination. Nature Methods 14, 290-296 (2017).
[0689] 46. D. Liebschner et al., Macromolecular structure determination using X-rays, neutrons and electrons: recent developments in Phenix. Acta Crystallographica Section D Structural Biology 75, 861-877 (2019).
[0690] 47. P. V. Afonine et al., Real-space refinement inPHENIXfor cryo-EM and crystallography. Acta Crystallographica Section D Structural Biology 74, 531-544 (2018).
[0691] 48. P. Emsley, B. Lohkamp, W. G. Scott, K. Cowtan, Features and development of Coot. Acta Crystallographica Section D Biological Crystallography 66, 486-501 (2010).
[0692] 49. L. Schrodinger, The PyMOL Molecular Graphics System. (2015).
[0693] 50. E. F. Pettersen et al., UCSF Chimera?A visualization system for exploratory research and analysis. Journal of Computational Chemistry 25, 1605-1612 (2004).
[0694] 51. T. D. Goddard et al., UCSF ChimeraX: Meeting modern challenges in visualization and analysis. Protein Science 27, 14-25 (2018).
[0695] 52. T. I. Croll, ISOLDE: a physically realistic environment for model building into low-resolution electron-density maps. Acta Crystallogr D Struct Biol 74, 519-530 (2018).
[0696] 53. S. R. Leist et al., A Mouse-Adapted SARS-COV-2 Induces Acute Lung Injury and Mortality in Standard Laboratory Mice. Cell 183, 1070-1085.e1012 (2020).
[0697] 54. A. Roberts et al., A mouse-adapted SARS-coronavirus causes disease and mortality in BALB/c mice. PLOS Pathog 3, e5 (2007).
[0698] 55. T. P. Sheahan et al., Comparative therapeutic efficacy of remdesivir and combination lopinavir, ritonavir, and interferon beta against MERS-COV. Nature Communications 11, 222 (2020).
[0699] 56. M. E. Schmidt et al., Memory CD8 T cells mediate severe immunopathology following respiratory syncytial virus infection. PLOS Pathog 14, e1006810 (2018).

1. A recombinant coronavirus monoclonal antibody, or an antigen binding fragment thereof, which binds to coronavirus spike protein and comprises a variable heavy (VH) domain and a variable light (VL) domain that have amino acid sequences that have an overall 80% sequence identity to the VH and VL domains of an antibody DH1041, DH1042, DH1043, DH1044, DH1045, DH1046, DH1047, DH1048, DH1049, DH1050.2, DH1051, DH1050.1, DH1052, DH1053, DH1054, DH1055, DH1056, DH1057, DH1058, DH1073, DH1221, DH1222, DH1223, DH1224, DH1225, DH1226, DH1235 or DH1236listed in Tables 3 6, 10 of 11, or wherein the VH domain and VL domain each have at least 80% sequence identity to the VH and VL domains, respectively, of an antibody DH1041, DH1042, DH1043, DH1044, DH1045, DH1046, DH1047, DH1048, DH1049, DH1050.2, DH1051, DH1050.1, DH1052, DH1053, DH1054, DH1055, DH1056, DH1057, DH1058, DH1073, DH1221, DH1222, DH1223, DH1224, DH1225, DH1226, DH1235 or DH1236.

2. A recombinant coronavirus monoclonal antibody, or an antigen binding fragment thereof, which binds coronavirus spike protein, which comprises:
a. Vh domain CDRH1-3 regions from an antibody DH1041, DH1042, DH1043, DH1044, DH1045, DH1046, DH1047, DH1048, DH1049, DH1050.2, DH1051, DH1050.1, DH1052, DH1053, DH1054, DH1055, DH1056, DH1057, DH1058, DH1073, DH1221, DH1222, DH1223, DH1224, DH1225, DH1226, DH1235 or DH1236; and/or
b. VI domain CDRL1-3 regions from an antibody DH1041, DH1042, DH1043, DH1044, DH1045, DH1046, DH1047, DH1048, DH1049, DH1050.2, DH1051, DH1050.1, DH1052, DH1053, DH1054, DH1055, DH1056, DH1057, DH1058, DH1073, DH1221, DH1222, DH1223, DH1224, DH1225, DH1226, DH1235 or DH1236listed in Table 4, wherein the Vh and VI are from the same antibody; and
c, wherein the framework of the variable heavy (Vh) domain comprises amino acid sequences that have at least 90% sequence identity to the V gene, D gene and J gene of the Vh gene of the corresponding antibody from which the CDRs are derived and wherein the framework of the variable light (VI) domain comprises amino acid sequences that have at least 90% sequence identity to the V and J genes of the VI gene from the corresponding antibody from which the CDRs are derived.

3. The recombinant antibody or the antigen binding fragment thereof of claim 2, wherein the antibody is DH1047 and the framework of the variable heavy (Vh) domain comprises amino acid sequences derived from human IGHV1-46 and IGHJ4 Ig genes and wherein the framework of the variable light (VI) domain comprises amino acid sequences derived from IGKV4-1 and IGKJI human IgG genes.

4. The recombinant antibody or the antigen binding fragment thereof according to claim 2, wherein the antibody is DH1073 and the framework of the variable heavy (Vh) domain comprises amino acid sequences derived from human IGHV1-46 and IGHJ6 Ig genes and wherein the framework of the variable light (VI) domain comprises amino acid sequences derived from IGKV3-11 and IGKJ1 human IgG genes.

5. The recombinant antibody or the antigen binding fragment thereof [of] according to claim 2, wherein the antibody is DH1042 and the framework of the variable heavy (Vh) domain comprises amino acid sequences derived from IGH1-69 and IGHJ6 human Ig genes and wherein the framework of the variable light (VI) domain comprises amino acid sequences derived from IGKV1-39 and IGKJ2 human IgG genes.

6. The recombinant antibody or the antigen binding fragment thereof according to claim 1, wherein the antibody or antigen binding fragment thereof, comprises a heavy chain comprising at least one CDRH1, at least one CDRH2 and at least one CDRH3 and a light chain comprising at least one CDRL1, at least one CDRL2 and at least one CDRL3, wherein at least one CDR, comprises an amino acid sequence according to any of paired VHH712384 and VI K711897 (DH1047), Vh DH1073 VH and VI DH1073 VK (DH1073), Vh DH1235 VH and VI DH1235 VK (DH1235), Vh H026103 and VI K023879 (DH1042), VH H026124 and VL L024055 (DH1041), VH H026116 and VL K023888 (DH1043), or a functional sequence variant thereof having at least 70%, at least 75%, at least 80%, at least 85%, at least 88%, at least 90%, at least 92%, at least 95%, at least 96%, at least 97%, at least 98% or at least 99% sequence identity.

7. The recombinant antibody or the antigen binding fragment thereof, according to claim 6, wherein the antibody or antigen binding fragment thereof, comprises paired VHH712384 and VI K711897 (DH1047), VhDH1073 VH and VI DH1073 VK (DH1073), Vh DH1235 VH and VI DH1235 VK (DH1235), VH H026103 and VI K023879 (DH1042), VH H026124 and VL L024055 (DH1041), VH H026116 and VL K023888 (DH1043) or a functional sequence variant thereof having at least 70%, at least 75%, at least 80%, at least 85%, at least 88%, at least 90%, at least 92%, at least 95%, at least 96%, at least 97%, at least 98% or at least 99% sequence identity.

8. The recombinant antibody, or the antigen binding fragment thereof, according to claim 1, wherein the antibody, or antigen binding fragment thereof binds to coronavirus domain RBD, NTD, or S2.

9. The antibody, or the antigen binding fragment thereof, according to claim 2, wherein the antibody, or antigen binding fragment thereof binds RBD.

10. The recombinant antibody, or the antigen-binding fragment thereof, according to claim 1, wherein the antibody, or antigen-binding fragment thereof, comprises an Fc moiety.

11. The recombinant antibody, or the antigen binding fragment thereof, according to claim 1, wherein the antibody, or the antigen binding fragment thereof, is a purified antibody IgG antibody, a multivalent antibody, multispecific antibody, a single chain antibody, Fab, Fab′, F(ab′)2, Fv or scFv.

12. The recombinant antibody, or the antigen-binding fragment thereof, according to claim 1, for use as a medicament.

13. A nucleic acid molecule comprising a polynucleotide encoding the antibody, or the antigen-binding fragment thereof, according to claim 1.

14. The nucleic acid molecule according to claim 13, wherein the polynucleotide sequence comprises a nucleic acid sequence pH026124 LS,v2, pL024055,v2, pH026103 LS,v2, pK023879,v2, pH026116 LS,v2, pK023888,v2, pH026077 LS,v2, pL024038,v2, pH026066 LS,v2, pL024032 L024042,v2, pH026204 LS,v2, pK023942,v2, pH712384 LS,v2, pK711897,v2, pL024008,v2, pH711733 G1.4 Å, pK711421,v2, pH026107,LS,v2, pK023882,v2, pH712151 LS,v2, pL711550,v2, pH025976 LS,v2, pK023811,v2, pH025988 LS,v2, pK023817,v2, pH025934 G1.4 Å, pK023788,v2, pH711725 G1.4 Å, pK711414,v2, DH1050.1 IgG1 LS ab026016, DH1051 IgG1 LS Ab026013, DH1050.1 IgL Ab026016, DH1051 IgL Ab026013, pH712564 LS,v2, pH712581 LS,v2, pH712587 LS,v2, pH712589 LS,v2, pH712593 H712600 LS,v2, pH712611 LS,v2, pK712022,v2, pK712032,v2, pK712037,v2, pK712038,v2, pK712041,v2, pK712052,v2, H026116 DNA Sequence, H026116 Expressed mRNA Sequence, K023888 DNA Sequence, K023888 Expressed mRNA Sequence, H026124 DNA Sequence, H026124 Expressed mRNA Sequence, L024055 DNA Sequence, L024055 Expressed mRNASequence, Duke P3 IgG1 LS IVT Plasmid Sequence, Duke P3 1gL IVT Plasmid Sequence, Duke P3 IgK IVT Plasmid Sequence, pH712189 LS,v2, pK711798,v2, pK711798,v2, DH1073 VH, DH1073 VK, DH1235 VH, DH1235 VK; or a functional sequence variant thereof having at least 70%, at least 75%, at least 80%, at least 85%, at least 88%, at least 90%, at least 92%, at least 95%, at least 96%, at least 97%, at least 98% or at least 99% sequence identity.

15. The nucleic acid of claim 13 wherein the nucleic acid is a ribonucleic acid (RNA).

16. The nucleic acid of claim 15, wherein the RNA is suitable for use and delivery as a therapeutic mRNA.

17. A vector comprising the nucleic acid molecule according to claim 13.

18. A cell expressing the antibody, or the antigen binding fragment thereof, according to claim 1.

19. A pharmaceutical composition comprising the antibody, or the antigen binding fragment thereof, according to claim 1, and a pharmaceutically acceptable carrier.

20. A pharmaceutical composition comprising the antibody, or the antigen binding fragment thereof, wherein the antibody, or the antigen binding fragment thereof, comprise a Vh and VI sequence of claim 1, wherein the Vh and VI sequences form a multivalent or multispecific antibody.

21. A pharmaceutical composition comprising at least one RBD binding antibody and at least one NTD binding antibody of claim 8.

22. A pharmaceutical composition comprising two RBD binding antibodies or antigen binding fragments thereof, wherein the two antibodies or antigen binding fragments thereof have non-overlapping epitopes.

23. The pharmaceutical composition according to claim 20 further comprising a pharmaceutically acceptable excipient, diluent or carrier.

24. A method of treating or preventing coronavirus infection in a subject in need thereof, comprising administering the recombinant antibody of claim 1 in an amount suitable to effect treatment or prevention of coronavirus infection.

25. The method of claim 24, wherein the antibody is administered prior to coronavirus exposure or at the same time as coronavirus exposure.

26. A method of treating or preventing coronavirus infection comprising administering a therapeutic or prophylactic amount of a composition comprising an antibody or antigen binding fragment thereof comprising a Vh and VI sequence of claim 1, wherein the Vh and VI sequences are comprised in a bi- or tri-specific antibody format or in a multivalent format.

The application's sequence listing, which the Patent Office published only in electronic form, follows.

SEQUENCE LISTING (1299 sequences)

SEQ ID NO: 1 - DNA, 373 bp, Artificial Sequence
  Description of Artificial Sequence: Synthetic polynucleotide
caggtgcagctggtggagtctgggggaggcgtggtccagcctgggaggtccctgagactctcatgtgtagcctctggactcgccttcagtaattacgctatgcactgggtccgccaggctccaggcaagggcctggagtgggtggcagtcatatcatatgacgggaacaatcaaaactacgcagactccgtgaggggccgattcaccatctccagagacaattccaagaacacactgtatctgcaaatcaacagcctgagagccgaggacacggctatatattactgtgtgcgattttactctcctctccacgatctcgtgattcattatggaaactactggggccagggggccctggtcaccgtctcctcag

SEQ ID NO: 2 - DNA, 367 bp, Artificial Sequence
  Description of Artificial Sequence: Synthetic polynucleotide
caggtccagctggtacagtctggggctgaggtgaagaagcctggggcctcagtgaaggtctcctgcaaggtttccggacacaccctcactcaattatccatgcactgggtgcgccaggctcctggacaagggcttgagtggatgggaacttttgatcctaaagatgatgaagcaatctacgcacaggagtttcagggcagagtcaccataaccgaggacgcatctacagacacagcctacatggaggtgaccagcctgagatctgaggacacggccgtgtattactgtgcaacagattcgatttttggagtggttatttatgcttttgctttctggggccaagggacaatggtcaccgtctcttcag

SEQ ID NO: 3 - DNA, 367 bp, Artificial Sequence
  Description of Artificial Sequence: Synthetic polynucleotide
gaggtgcagctggtgcagtctggagcagaggtgaaaaagcccggggagtctctgtacatctcctgtaaggcttccggatacgactttacctcctactggatcggctgggtgcgccagatgcccgggaaaggcctggagtggatggggatcatctatcctgctgactctgatgccagatacagcccgtccttccaaggccaagtcaccatctcagtcgacaaatccatcactaccgcctacttacagtggaccagtctgaagccctcggacaccgcaatgtattactgtgcgagggaggcgatagtggaaggtgccaggggaccttttgatttctggggccaagggacgatggtcgccgtctcttcag

SEQ ID NO: 4 - DNA, 382 bp, Artificial Sequence
  Description of Artificial Sequence: Synthetic polynucleotide
gaggtgcagctggtggagtctgggggaggcttggtccagcctggggggtccctgagactctcctgttcagcctctggattcaccttcagtagctatgctatgcactgggtccgccaggctccagggaagggactggaatatgtttcagctattagtagtaatgggggtagcacatactacgcagactccgtgaagggcagattcaccatctccagagacaattccaagaacacgctgtatcttcaaatgagcagtctgagagctgaggacacggctgtgtattactgtgtgaaagatctcgctgttcaggactatgatagtagtggttatttcgatccgggtgatatctggggccaagggacaatggtcaccgtctcttcag

SEQ ID NO: 5 - DNA, 367 bp, Artificial Sequence
  Description of Artificial Sequence: Synthetic polynucleotide
caggtccagctggtacagtctggggctgaggtgaagaagcctggggcctcagtgaaggtctcctgtagggcttccggatactccctcactgctttgcccatgtactgggtgcgacaggcccctggagaagggcttgagtgggtgggaacttttgatcccgaagatggtgagacagtctactcacagaagttccagggcagagtcaccttgaccgaggacacatctacggacacagcctacatggagttgagcagcctgagatctgaggacacggccgtgtattactgcacaacagaatcgatttttggcgtggttatctatgcttttgctatctggggccaagggacactggtcaccgtctctccag

SEQ ID NO: 6 - DNA, 367 bp, Artificial Sequence
  Description of Artificial Sequence: Synthetic polynucleotide
gaggtgcagctggtgcagtctggagcagaagtgaaaaagcccggggagtctctgaagatctcctgtaaggcttctggatacaactttaacaatcactggatcggctgggtgcgccagatgcccgggaagggcctggagtggatgggaatcatctatcctgatgactttgataccagatacagcccgtctttccaaggccaagtcaccatctcagtcgacaaatccatcactaccgcctacctgcagtggagcagcctgaagccctcggacaccgccatgtattactgtgcgagagaggaagtactggaagctgccaggggaccttttgatgtctggggccaagggacaatggtcgccgtctcttcag

SEQ ID NO: 7 - DNA, 373 bp, Artificial Sequence
  Description of Artificial Sequence: Synthetic polynucleotide
caggtgcagctggtggagtctgggggaggcgtggtccagcctgggaggtccctgagactctcatgtgtagcctctggactcgccttcagtaattacgctatgcactgggtccgccaggctccaggcaagggcctggagtgggtggcagtcatatcatatgacgggaacaataaaaactacgcagactccgtgaggggccgattcaccatctccagagacaattccaagaacacgctgtatctgcaaatcaacagcctgagagccgaggacacggctgtatattactgtgtgcgattttactctcctctccacgatctcgtgattcattatggaaactactggggccagggggccctggtcaccgtctcctcag

SEQ ID NO: 8 - DNA, 378 bp, Artificial Sequence
  Description of Artificial Sequence: Synthetic polynucleotide
gaggtgcagctggtgcagtctggagcagaggtgaaagagcccggggagtctctgaagatctcctgtaaggcttctggatacacctttaccaacaactggatcggctgggtgcgccagatgcccgggaaaggcctggagtggatggggatcatctatcctggcgactctgataccagatacagtccgtccttccaaggccaggtcaccatcgcagccgacaactccatcgacaccgcctacctgcagtggagcagcctgaaggcctcggacaccgccatgtattactgtgcgagacatgagactcaacacgacagtagtgggacttactacctcggtatggacgtctggggccaagggaccacggtcatcgtctcctca

SEQ ID NO: 9 - DNA, 367 bp, Artificial Sequence
  Description of Artificial Sequence: Synthetic polynucleotide
gaggtgcagctggtgcagtctggaccagaaataaaagagcccggggagtctgtgatgatctcctgttgggcttctggatacatctttaccaactactggatcggctgggtgcgccagatgcccgggaaaggcctggagtggatgggaatcgtctatcctggtgactctgataccagatacaacccgtccttccaaggccaagtcagcatctcagtcgacaagtccataaataccgcctatctgcagtggaaaaatctgaagccctcggacaccgccatgtattactgtgtgagagaggaaatagtgggaggtgccaggggacccattgatacctggggccaagggacaatgctcaccgtctcttcag

SEQ ID NO: 10 - DNA, 367 bp, Artificial Sequence
  Description of Artificial Sequence: Synthetic polynucleotide
gaggtgcagctggtgcagtctggagcagaagtgaaaaagcccggggagtctctgaagatctcctgtaaggcttctggatacaactttaacaatcactggatcggctgggtgcgccagatgcccgggaaaggcctggagtggatgggaatcatctatcctgatgactttgataccagatacagcccgtccttccaaggccaagtcaccatctcagtcgacaaatccatcactaccgcctacctgcagtggagcagcctgaagccctcggacagcgccatgtattactgtgcgagagaggaaatagtggaagctgccaggggaccttttgatgtctggggccaagggacaatggtcgccgtctcttcag

SEQ ID NO: 11 - DNA, 378 bp, Artificial Sequence
  Description of Artificial Sequence: Synthetic polynucleotide
gaggtgcagctggtgcagtctggagcagaggtgaaaaagcccggggagtctctgaagatctcctgtaaggcttctggatacagctttaccaacaactggatcggctgggtgcgccagatgcccgggaaaggcctggagtggatggggatcatctatcctggcgactctgataccagatacagcccgtccttccaaggccaggtcaccatcgcagccgacaactccatcagcaccgcctacctgcagtggagcagcctgaaggcctcggacaccgccatgtattactgtgcgagacatgagactcaacacgatagtagtgggacttactacctcggtatggacgtctggggccaagggaccacggtcaccgtctcctca

SEQ ID NO: 12 - DNA, 367 bp, Artificial Sequence
  Description of Artificial Sequence: Synthetic polynucleotide
gaggtgcagctggtgcagtctggagcagaggtgaagaagcccggggaggctgtgaagatctcctgtagggcttctggatacgactttgccaactactggatcggctgggtgcgccagatgcccgggaaaggcctggagtggatggggatcatctatcctagtgactctgataccagatacagcccgtccttccaaggccaggtcaccatctcagtcgacaaatccataactaccgcctacctgcagtggagtagcctgaaggcctcggacaccgccatgtattactgtacgagagaggcaatagtggcaggtgccaggggacctattgatttctggggccaagggacaatggtcaccgtctcttcag

SEQ ID NO: 13 - DNA, 390 bp, Artificial Sequence
  Description of Artificial Sequence: Synthetic polynucleotide
caggttcagctggtgcagtctggagctgaggtgaagaagcctggggcctcagtgaaggtctcctgcaaggcttctggttacacctttaccagctatggtatcagctgggtgcgacaggcccctggacaagggcttgagtggatgggatggatcagcgtttacaatggtaacacatataatgcacagcagttccagggcagagtcaccatgaccacagacacatccacgagcacagcctacatggagctgaggagcctgagatctgacgacacggccgtgtattactgtgcgagagtgaactattcctattatagcagctcgttcttcgattacttctactactatggtatggacgtctggggccaagggaccacggtcaccgtctcctca

SEQ ID NO: 14 - DNA, 378 bp, Artificial Sequence
  Description of Artificial Sequence: Synthetic polynucleotide
gaggtgcagctggtgcagtctggagcagaggtgaaaaagcccggggagtctctgaagatctcctgtaaggcttctggatacagctttaccaacaactggatcggctgggtgcgccagatgcccgggaaaggcctggagtggatgggcatcatctatcctggcgactctgatatcagatacagcccgtccttccgaggccaggtcaccatcgcagccgacaactccatcagcaccgcctacctgcagtggagcagcctgaaggcctcggacaccgccatgtattactgtgcgagacatgagactcaacacgatagtagtgggacttactacctcggtatggacgtctggggccaagggaccacggtcaccgtctcctca

SEQ ID NO: 15 - DNA, 367 bp, Artificial Sequence
  Description of Artificial Sequence: Synthetic polynucleotide
gaggtgcagctggtgcagtctggagcagaggtgaagaagcccggggagtctgtgaagatctcctgtagggcttctggatacgactttgccaactactggatcgcctgggtgcgccagatgcccgggaaaggcctggagtggatgggagtcatctatcccgctgactctgacaccagatatagcccgtccttccaaggccaggtcaccatctcagtcgacaaatccacaactaccgcctacctgcagtggagcagcctgaagtcctcggacacagccatgtattactgtacgcgagaggcaattttgggaggtgccaggggacctattgatttatggggccgagggacaatggtcaccgtctcttcag

SEQ ID NO: 16 - DNA, 635 bp, Artificial Sequence
  Description of Artificial Sequence: Synthetic polynucleotide
caggtgcagctggtggagtctgggggaggcgtggtccagcctgggaggtccctgagactcgcctgtgcaacgtctgcattcatcttcaataaatatgacttgcagtgggtccgccaggctccaggcaaggggctggagtgggtggcagtaaaatggtatgatgggatgatggaagtaacaaatatcatggagactccgtgaagggccgattctccattcccagagacaattcgaagaacaattcgaagatcacgttaagaatacgttgtatctggaaaagaacagcctgagagccgaggacacggctctatattattgtgcgagagacttaggggtgactgcgttgtgcgagagatgttgtgcgggagattcaacagcggccacacagacgaggggcaagggctccagatgctccttcctcctgagccctgcacgggtctctctgtggccagggccaccctaggcctctggggtccaatgcccaacaacccccgggccctccccgggctcggtctgagagggtcccagggccgtggcggggcgccagttcttgcctggggtcctgccattgttgtcacaatgtgacaagtggttcgacccctggggccagggaaccctggtcaccgtctcctcag

SEQ ID NO: 17 - DNA, 358 bp, Artificial Sequence
  Description of Artificial Sequence: Synthetic polynucleotide
caggtgcagctgcaggagtcgggcccaggactggtgaagccttcacagaccctgtccctcacctgcactgtctctggtggctccatcagtagtggtggttactactggaactggatccgccagcacccagggaagggcctggagtggattggctacatcttttacagtgggagcacctactacaacccgtccctcaagagtcgagttatcatatcagtggacacgtctaagaatcagttctccctgaagctgagctctgtgactgccgcggacacggccgtgtattactgtgcgagacggggtacggactggtacttcgatctctggggccgtggcaccctggtcactgtctccccag

SEQ ID NO: 18 - DNA, 364 bp, Artificial Sequence
  Description of Artificial Sequence: Synthetic polynucleotide
gaggtgcagctggtggagtctgggggaggcttggtccagcctggggggtccctcaaactgtcctgtgcaacgtctgggttcgtcttcagtgactctgctgtgcactgggtccgccaggctcccgggaaaggactggagtgggttggacgcattagaagcaaagctaatagtcacgcgacatcagtccctccgtcggtggaaggcaggttcatcatttccagagatgattcaaagcacacggcgtatctgcaaatgaaccgcctgaaaaccgaggacacggccatatattactgcactgtacgattagtgcctgttgataagtttgactactggggccagggaaccctggtcagcgtctcctcag

SEQ ID NO: 19 - DNA, 367 bp, Artificial Sequence
  Description of Artificial Sequence: Synthetic polynucleotide
caggtccagctggtacagtctggggctgaggtgaagaagcctggggactcagtgaaggtctcctgtaggctttccggatacagcctcagtgattcgcccatgtattgggtgcgacaggctccgggaggagggcttgagtgggtgggaacttctgatcccgaagatggtgagacggtctactcacagaagttccaggacagactcaccttgaccgaggacacatcaacggaaacagcctacatggagctgagcagcctgacatctgacgacacggccgtgtattattgtacaacagaatcgatttttggcgtggttatctatgcttttgctatctggggccaagggacactggtcaccgtctcctcag

SEQ ID NO: 20 - DNA, 378 bp, Artificial Sequence
  Description of Artificial Sequence: Synthetic polynucleotide
gaggtgcagctggtgcagtctggagcagaggtgaaaaagcccggggagtctctgaggatttcctgtaaggcttctggatacacctttaccaacaactggatcggctgggtgcgccagatgcccgggaaaggcctggagtggatggggatcatctatcctggcgactctgatatcagatacagcccgtccttccaaggccaggtcaccatcgcagccgacaactccatcagcaccgcctacctgcagtggagcagcctgaaggcctcggacaccgccatgtattactgtgcgagacatgagactcaacacgatagtagtgggacttactacctcggtatggacgtctggggccaagggaccacggtcaccgtctcctca

SEQ ID NO: 21 - DNA, 376 bp, Artificial Sequence
  Description of Artificial Sequence: Synthetic polynucleotide
caggtgcagctggtggagtctgggggaggcgtggtccagcctgggaggtccctgagactctcctgtgcagcgtctggattcaccttcagtagctatggcatgcactgggtccgccaggctccaggcaaggggctggagtgggtggcagttatatggtatgatggaagtaataaatactatgcagactccgtgaagggccgattcaccatctccagagacaattccaagaacacgctgtatctgcaaatgaacagcctgagagccgaggacacggctgtgtattactgtgcgagcgattactatgatagtagtggttacccatgggattactactttgactactggggccagggaaccctggtcaccgtctcctcag

SEQ ID NO: 22 - DNA, 367 bp, Artificial Sequence
  Description of Artificial Sequence: Synthetic polynucleotide
gaggtgcagctggtgcagtctggagcagaggtgaaaaagcccggggagtctctgaagatctcctgtaagacttctggatacactttcaacaattactggatcggctgggtgcgccagatgcccgggaaaggccttgagtggatgggaatcatctatcctgaagattttgacaccagatacagcccgtccttccaaggccaagtcaccatctcagtcgacaaatccagcactacagcctacctgcactggaccaacctgaagccctcggacaccgccatgtattattgtgcgagagaggaaatagtggaaggtgccagggggccttttgatgtctggggccaggggacaatggtcgtcgtctcatcag

SEQ ID NO: 23 - DNA, 367 bp, Artificial Sequence
  Description of Artificial Sequence: Synthetic polynucleotide
gaggtgcagctggtgcagtctggaacagaggtgaaaaagcccggggagtctctgaagatctcctgtaaggcttctggatacaactttaataatcactggatcggctgggtgcgccagatgcccgggaaaggcctggagtggatgggaatcatctatcctgatgactatgataccagatacagcccgtccttccaaggccaagtcaccatctcagtcgacaaatccatcactaccgcctacctgcattggggcagcctggagccctcggacaccgccatgtattactgtgcgagagaggaaatcgtggaagctgccaggggaccttttgatgtctggggccaagggacaatggtcgccgtctctccag

SEQ ID NO: 24 - DNA, 367 bp, Artificial Sequence
  Description of Artificial Sequence: Synthetic polynucleotide
gaggtgcagctggtgcagtctggaacagaggtgaaaaagcccggggagtctctgaagatctcctgtaagacttctggatacaacttcaacaattactggatcggctgggtgcgccagatgcccgggaaaggcctggagtggatgggaatcatctatcctgaagactttgacaccagatacagcccgtccttccaaggccaagtcaccatctcagtcgacaagtccatcactaccgcctacctgcagtggaccaacctgaagccctcggacaccgccatgtattactgtgcgagagaggaaatagtggaagctgccaggggaccttttgatgtctggggccaagggacaatggtcgtcgtctcttcag

SEQ ID NO: 25 - DNA, 358 bp, Artificial Sequence
  Description of Artificial Sequence: Synthetic polynucleotide
cagctgcagctgcaggagtcgggcccaggaccggtgaagccttcggagaccctgtccctcacctgcactgtctctggtgactccatcagcaatgataattactactggggctggatccgccagcccccagggaaggggctggagtggattgggactttctattatagtggaaacacctactacaacccgtccctcaagagtcgagtcaccatatccgtagacacgtccagcaaccagttctccctgaagttgcgctctgtgaccgccgcagacacggctatttattactgtgcgggggcatcggatttggactactttgactactggggccagggcaccctggtcaccgtctcctcag

SEQ ID NO: 26 - DNA, 346 bp, Artificial Sequence
  Description of Artificial Sequence: Synthetic polynucleotide
gaggtgcagctggtggagtctgggggagacttggtacagcctggggggtccctcagactctcctgtgcagcctctggattcaccttcacaacctatgccatgacctgggtccgccaggctccagggaaggggctggaatgggtctcaactattagtactactggtggtgacacatactatgcagactccgtgaagggccggttcaccatctccagagacaattccaggaacacactgaatctgcagatgaacagcctgagagccgaggacacggccgtatattcgtgtgcgagacataatgagcttgaccactggggccagggaaccctggtcatagtctcctcag

SEQ ID NO: 27 - DNA, 370 bp, Artificial Sequence
  Description of Artificial Sequence: Synthetic polynucleotide
caggtgcagctggtgcaatctgggtctgagttgaagaagcctggggcctcagtgaaggtttcctgcaaggcttctggatacaccttcactagctatgctatgaattgggtgcgacaggcccctggacaagggcttgagtggatgggatggatcaacaccaacactgggaacccaacgtatgcccagggcttcacaggacggtttgtcttctccttggacacctctgtcagcacggcatatctgcagatcagcagcctaaaggctgaggacactgccgtgtattactgtgcggggggttacgatttttggagtggttatcctaaccccactgactactggggccagggaaccctggtcaccgtctcctcag

SEQ ID NO: 28 - DNA, 349 bp, Artificial Sequence
  Description of Artificial Sequence: Synthetic polynucleotide
caggtgcagctgcaggagtcgggcccaggactggtgaagccttcggggaccctgtccctcacctgcgctgtctctggtggctccatcagcagtagtaactggtggagttgggtccgccagcccccagggaaggggctggagtggattggggaaatctatcatagtgggagcaccaactacaacccgtccctcaagagtcgagtcaccatatcagtagacaagtccaagaaccagttctccctgaagctgagctctgtgaccgccgcggacacggccgtgtattactgtgcgatggttcagggagttatggtctactggggccagggaaccctggtcaccgtctcctcag

SEQ ID NO: 29 - DNA, 358 bp, Artificial Sequence
  Description of Artificial Sequence: Synthetic polynucleotide
caggtgcagctggtggagtctgggggaggcgtggtccagcctgggaggtccctgagactctcctgtgcagcctctggattcaccttcagtagctatggcatgcactgggtccgccaggctccaggcaaggggctggagtgggtggcagttatatcatatgatggaagtaataaatactatgcagactccgtgaagggccgattcaccatctccagagacaattccaagaacacgctgtatctgcaaatgaacagcctgagagctgaggacacggctgtgtattactgtgcgaaagactacggtgactacggagcctttgactactggggccagggaaccctggtcaccgtctcctcag

SEQ ID NO: 30 - DNA, 373 bp, Artificial Sequence
  Description of Artificial Sequence: Synthetic polynucleotide
gaggtgcagctggtggagtctgggggaggcttggtacagcctggggggtccctgagactctcctgtgcagcctctggattcaccttcagtagctatagcatgaactgggtccgccaggctccagggaaggggctggagtgggtttcatacattagtagtagtagtagtaccatatactacgcagactctgtgaagggccgattcaccatctccagagacaatgccaagaactcactgtatctgcaaatgaacagcctgagagacgaggacacggctgtgtattactgtgcgagagatcggaatcgaggctacaacaaattaggcgatgcttttgatatctggggccaagggacaatggtcaccgtctcttcag

SEQ ID NO: 31 - DNA, 352 bp, Artificial Sequence
  Description of Artificial Sequence: Synthetic polynucleotide
gaggtgcagctggtggagtctggaggaggcttgatccagcctggggggtccctgagactctcctgtgcagcctctgggttcaccgtcagtagcaactacatgagctgggtccgccaggctccagggaaggggctggagtgggtctcagttatttatagcggtggtagcacatactacgcagactccgtgaagggccgattcaccatctccagagacaattccaagaacacgctgtatcttcaaatgaacagcctgagagccgaggacacggccgtgtattactgtgcgagagcgtacggtgactacttctttgactactggggccagggaaccctggtcaccgtctcctcag

SEQ ID NO: 32 - DNA, 402 bp, Artificial Sequence
  Description of Artificial Sequence: Synthetic polynucleotide
gaggtgcagctggtggagtctgggggaggcctggtcaagcctggggggtccctgagactctcctgtgcagcctctggattcaccttcagtagctatagcatgaactgggtccgccaggctccagggaaggggctggagtgggtctcatccattagtagtagtagtagttacatatactacgcagactcagtgaagggccgattcaccatctccagagacaacgccaagaactcactgtatctgcaaatgaacagcctgagagccgaggacacggctgtgtattactgtgcgagaccgcataatccagcagcatattgtagtggtggtagctgctactccgcttactactactactacggtatggacgtctggggccaagggaccacggtcaccgtctcctca

SEQ ID NO: 33 - DNA, 358 bp, Artificial Sequence
  Description of Artificial Sequence: Synthetic polynucleotide
gaggtgcagctggtggagtctgggggaggcttgatacagccgggggggtccctgagactctcctgtgcagcctctggattattcttcggtgcttacagcatgaactgggtccgccaggctccagggaaggggctggagtgggttgcgtacattagtagtagtagcaaaaccatatattatgcagattctgtgaagggccgattcaccatctctagagacaacgccaagaatgaattgtttctacaaatgaccagcctgagggacgaggacacggctgtctatttttgtgcctgtatggtggggccgactgctccttttgacttctggggccagggaacccgggtcaccgtctcctcag

SEQ ID NO: 34 - DNA, 373 bp, Artificial Sequence
  Description of Artificial Sequence: Synthetic polynucleotide
cagctgcagctgcaggagtcgggcccaggactggtgaagccttcggagaccctgtccctcacctgcactgtctctggtggctccatcagcagtagtagttactactggggctggatccgccagcccccagggaaggggctggagtggattgggagtatctattatagtgggagcacctactacaacccgtccctcaagagtcgagtcaccatatccgtagacacgtccaagaaccagttctccctgaagatgagctctgtgaccgccgcagacacggctgtgtattactgtgcgagacgcggttattacgatttttggagtggaccgatctttgactactgggggctgggaaccccgtgctcctgctcgtcag

SEQ ID NO: 35 - DNA, 379 bp, Artificial Sequence
  Description of Artificial Sequence: Synthetic polynucleotide
caggtgcagctggtggagtctgggggaggcgtggtccagcctgggaggtccctgagactctcgtgtgcagcgtctggattcagcttcaataactatggtttccactgggtccgccaggctccaggcaaggggctggagtggttgacatccatatggcatgatggaagtagggagttctatgcagactccgtgaagggccgattcaccatctccagagacaacccccagaacacgatgtatctgcaaatgaacagcctgagagccgaggacacggctctgtatttctgtgcgagggatgtcgcccactgtactactgtcggctgccatggaaactggttcgacacctggggccagggaaccctggtcaccgtctcctcag

SEQ ID NO: 36 - DNA, 379 bp, Artificial Sequence
  Description of Artificial Sequence: Synthetic polynucleotide
caggtgcagctggtggagtctgggggaggcgtggtccagcctgggaggtccctgagactctcctgtgcagcctctggattcaccttcagtagctatggcatgcactgggtccgccaggctccaggcaaggggctggagtgggtggcagttatatcatatgatggaagtaataaatactatgcagactccgtgaagggccgattcaccatctccagagacaattccaagaacacgctgtatctgcaaatgaacagcctgagagctgaggacacggctgtgtattactgtgcgaaagaaggaaataactacgatttttggagtggttattcttactactttgactactggggccagggaaccctggtcaccgtctcctcag

SEQ ID NO: 37 - DNA, 364 bp, Artificial Sequence
  Description of Artificial Sequence: Synthetic polynucleotide
caggtgcagctggtggagtctgggggaggcgtggtccagcctgggaggtccctgagactctcctgtgcagcctctggattcaccttcagtagctatgctatgcactgggtccgccaggctccaggcaaggggctggagtgggtggcagttatatcatatgatggaagcaataaatactacgcagactccgtgaagggccgattcaccatctccagagacaattccaagaacacgctgtatctgcaaatgaacagcctgagagctgaggacacggctgtgtattactgtgcgagaagttcctcggggagttatctctactactttgactactggggccagggaaccctggtcaccgtctcctcag

SEQ ID NO: 38 - DNA, 385 bp, Artificial Sequence
  Description of Artificial Sequence: Synthetic polynucleotide
gaggtgcagctggtggagtctgggggaggcttggtagagcctggggggtcccttagactctcctgtgcaccctctggtttcactttcaataacgcctggatgaattgggtccgccaggctccagggaaggggctagagtgggtcggccgtattaaaagtgagactgatggtgggacaacagactacgctgcacccgtgagaggcagattcaccatctcaagaaatgattcaataaacaccctgtatatggtaatacacagcctgaaaattgaggacacagccctgtatttctgtaccacagtccattctgactacgtttgggggtcttatcgtaaggggtactttgactactggggccagggagccctggtcaccgtctcctcag

SEQ ID NO: 39 - DNA, 396 bp, Artificial Sequence
  Description of Artificial Sequence: Synthetic polynucleotide
caggtgcagctgcaggagtcgggcccaggactggtgaagccttcacagaccctgtccctcacctgcactgtctctggtggctccatcagcagtggtagttactactggagctggatccggcagcccgccgggaagggactggagtggattgggcgtatctataccagtgggagcaccaactacaacccctccctcaagagtcgagtcaccatatcagtagacacgtccaagaaccagttctccctgaagctgagctctgtgaccgccgcagacacggccgtgtattactgtgcgagagatctcggtttacgatattttgactggttattacgatcagactactactactacggtatggacgtctggggccaagggaccacggtcaccgtctcctca

SEQ ID NO: 40 - DNA, 385 bp, Artificial Sequence
  Description of Artificial Sequence: Synthetic polynucleotide
gaggtccagctggtacagtctggggctgaggtgaagaagcctggggctacagtgaaaatctcctgcaaggtttctggatacaccttcaccgactactacatgcactgggtgcaacaggcccctggaaaagggcttgagtggatgggacttgttgatcctgaagatggtgaaacaatatacgcagagaagttccagggcagagtcaccataaccgcggacacgtctacagacacagcctacatggagctgagcagcctgagatctgaggacacggccgtgtattactgtgcaacatcttcgggtcccagtcggctttgtggtggtggtagctgctaccattcatttgactactggggccagggaaccctggtcaccgtctcctcag

SEQ ID NO: 41 - DNA, 376 bp, Artificial Sequence
  Description of Artificial Sequence: Synthetic polynucleotide
cagctgcagctgcaggagtcgggcccaggactggtgaagccctcggagtccctgtccctcaacttcaatgtctctggtgcctccatcaacagtagtgattattattggggctgcatccgccagcccccagggaagggggtggaatgaaatggaactatctcttacagtgggagaacctgccacaagccgtccctcacgagtcgagtcagcatatccatagacacgtcccagagttaggtctcgaagttgagctctgtgaccgccgcagacacgggtgtgtcttaaaatgcgagccgaccccggtgactgcgccctttcttcttggtacttcgatatggacgtctggggccaagggaccacggtcaccgtctcctca

SEQ ID NO: 42 - DNA, 396 bp, Artificial Sequence
  Description of Artificial Sequence: Synthetic polynucleotide
caggtgcagctggtggagtctgggggaggcgtggtccagcctgggaggtccctgagactctcctgtgcagcctctggattcaacttcggcgactttggcatgcattgggtccgccaggctccaggcaaggggctggagtgggtggcagttatatcatatgagggaaggaataaaaatcatgcagactccgtgaggggccgattcaccatctccagagacaattcgaggaacatgctgtatcttcagatgaacagcctgagaggtggggacacggcagtgtattactgtgcgaaagaaaacagagatagaaattacgattcttggagtgcctcttatagtgactactactacggtatggacgtctggggccaagggaccacggtcaccgtctcctca

SEQ ID NO: 43 - DNA, 376 bp, Artificial Sequence
  Description of Artificial Sequence: Synthetic polynucleotide
cagctgcagctgcaggagtcgggcccaggactggtgaagccttcggagaccctgtccctcacctgcactgtctctggtggctccatcagcagtagtagttactactggggctggatccgccagcccccagggaaggggctggagtggattgggagtatctattatagtgggagcacctactacaacccgtccctcaagagtcgagtcaccatatccgtagacacgtccaagaaccagttctccctgaagctgagctctgtgaccgccgcagacacggctgtgtattactgtgcgggcgaaggactacggtggtatcaactagcccactggtacttcgatctctggggccgtggcaccctggtcactgtctcctcag

SEQ ID NO: 44 - DNA, 396 bp, Artificial Sequence
  Description of Artificial Sequence: Synthetic polynucleotide
caggtgcagctggtggagtctgggggaggcgtggtccagcctgggcggtccctgagactctcctgtgtagcctctggattcaacttcagcgactatggcatgcactgggtccgccaggctccaggcaaggggctggagtgggtggcagttatatcatatgaagggaggaataaaaaccacgcagactccgtgaagggccgattcaccatctccagagacaatccgaagaacactctgtattttgaaatgaacagcctgagagctgacgacacggctgtgtattactgtgcgaaagaaaacagagataggaattacgattcttggagtggttcttatagtgactactactacggtatggacgtctggggccgagggaccacggtcaccgtctcctca

SEQ ID NO: 45 - DNA, 367 bp, Artificial Sequence
  Description of Artificial Sequence: Synthetic polynucleotide
caggtgcagctggtgcagtctgggactgaggtgaagaagcctggggcctcagtgaaggtctcctgcaagacatctggatacatattcaccaactactatatccactgggtgcgacaggcccctggacaagggcttgagtggatgggcatattcaaccctaatggtggcggcacaagctacgcacagaagttccagggcagaatcaccttgaccggcaacacgtccgcgaatacaggctatatggtattgaggagcctgacatctgaggacacggccgtttattattgtgcgagagatccacgcacttcgggtgacaatgatggttttgatatgtggggccaggggacaaaggtcaccgtctcttcag

SEQ ID NO: 46 - DNA, 378 bp, Artificial Sequence
  Description of Artificial Sequence: Synthetic polynucleotide
gaggtgcagctggtggagtctgggggaggcctcatgcagccgggggggtccctgagactctcctgtgcagtctctggattcacctttaggagttatgccatgacttgggtccgccaggctccagggaaggggctggagtgggtctcaagtattagtggtagtagtaatagcacatattacgcagagtccctgaagggccgggtcaccatctacagagacaattccaagaatacactatatctacaaataagtagcctgagagccgaggacacggccgcatattactgtgcgagaggtcctcaatgtactagtgccggttgctatgtcgtgggtgctatggacgtctggggccaagggaccacggtcaccgtcccctca

SEQ ID NO: 47 - DNA, 396 bp, Artificial Sequence
  Description of Artificial Sequence: Synthetic polynucleotide
caggtgcagctggtggagtctgggggaggcgtggtccagcctgggaggtccctgagactctcctgtgcagcctctggattcaacttcaatgactatggcatgcactgggtccgccaggctccaggcaaggggctggagtgggtggcagttatttcatttgagggaaggaataaaaaccatgcagactccgtgaggggccgattcaccatctccagagacaatccgaagaacatgctgtatcttcaaatgaacagcctgagagctgaggacacggctgtgtattactgtgcgaaagaaaacagagataggaattacggttcttggagtggttctaacagtgactactactacggtatggacgtctggggccaagggaccacggtcaccgtctcctca

SEQ ID NO: 48 - DNA, 367 bp, Artificial Sequence
  Description of Artificial Sequence: Synthetic polynucleotide
caggtgcagctgcaggagtcgggcccaggactggtgaagccttgggggaccctgtccctcacctgcgctgtgtctggtggctccatcagcagtagtcactggtggacttgggtccgccagcccccagggaaggggctggagtggattggggaagtccatcacagtggaaacaccaactacaacccgtccctcaggactcgagtcaccatagcggttgacaagtctaagaaccacttctccctgaggctgacttctgtgaccgccgcggacacggccgtgtattattgtgcgagactattttcggatagtgggaactacttctggttcgacccctggggccagggaaccctggtccccgtctcctcag

SEQ ID NO: 49 - DNA, 378 bp, Artificial Sequence
  Description of Artificial Sequence: Synthetic polynucleotide
gaggtgcagctggtggagtctgggggaggcctggtcaagccgggggggtccctgagactctcctgtgcagcctctggcttcaccttcagtgcctacttcatcaactgggtccgccaggctccagggaaggggctggagtgggtcgcatccgttgaaagtagtggccgtcagaaatcttacgcagactcagtgaagggccgattcaccatctccagagacaacgccaaaaattcagtctttctgcacatggcgagcctgagagccgaggatacggctatttattactgtgcgagagagggaattacgagttttggaatcgttacacactattacgctctggacgtctggggccaagggaccacggtcaccgtctcttca

SEQ ID NO: 50 - DNA, 367 bp, Artificial Sequence
  Description of Artificial Sequence: Synthetic polynucleotide
cagatcaccttgaaggagtctggtcctacgctggtgaaacccacacagaccctcacgctgacctgcaccttctctgggttctcactcagcactagtggagtgggtgtgggctggatccgtcagcccccaggaaaggccctggagtggcttgcactcatttattgggatgatgataagcgctacagcccatctctgaagagcaggctcaccatcaccaaggacacctccaaaaaccaggtggtccttacaatgaccaacatggaccctgtggacacagccacatattactgtgcacacatcgtgatagcagtggctcggtactactttgactactggggccagggaaccctggtcaccgtctcctcag

SEQ ID NO: 51 - DNA, 373 bp, Artificial Sequence
  Description of Artificial Sequence: Synthetic polynucleotide
caggtgcagctggtggagtctgggggaggcgtggtccagcctgggaggtccctgagactctcctgtgcagcgtctgaattcaccttcagtagttatggcatgcactgggtccgccaggctccaggcaaggggctggagtgggtggctgttatatggtttgatggaagtaataaatactatgcagaccccgtgaagggccgcttcaccatctccagagacaattccaagaacgcactctatcttcaaatgaacaacctgagagccgaggacacggctgtgtattactgtgcgagagatcaggatttttggagtggttattatttgccttggttcgacccctggggccagggaaccctggtcaccgtctcctcag

SEQ ID NO: 52 - DNA, 370 bp, Artificial Sequence
  Description of Artificial Sequence: Synthetic polynucleotide
caggtgcagctggtggagtctgggggaggcgtggtccagcctgggaggtccctgagactctcctgtgcagcgtctggattcaccttcagtagctatggcatgcactgggtccgccaggctccaggcaaggggctggagtgggtggcagttatatggtatgatggaagtaataaatactatgcagactccgtgaagggccgattcaccatctccagagacaattccaagaacacgctgtatctgcaaatgaacagcctgagagccgaggacacggctgtgtattactgtgcgagcgagcccatcgtagcagctcgaactagcttcgaaacagactactggggccagggaaccctggtcaccgtctcctcag

SEQ ID NO: 53 - DNA, 370 bp, Artificial Sequence
  Description of Artificial Sequence: Synthetic polynucleotide
caggtgcagctgcaggagtcgggcccaggactggtgaagccttcggagaccctgtcactcacctgctctgtctctggtgactccatccaaacgggtactcactggtggacttgggtccgccagcccccagggaaggggctggagtggattggggaagtccatcacagcgggaacaccaattacaacccgtccctcaagagccgagtcaccatgtcagtggacaagtctcagaatcggttcttcctggaggtgaactctatgaccggcgcggacacgcccgtctattattgtgcgaggctgttcgcggatagggggggctacttctggttcgacccctggggccagggagccctggtcaccgtcacctcag

SEQ ID NO: 54 - DNA, 376 bp, Artificial Sequence
  Description of Artificial Sequence: Synthetic polynucleotide
gaggtgcagctggtggagtctgggggaggcctgctacagccgggggggtccctgagactctcctgtgcagtctctggattcacctttagtacttatgccatgacctgggtccgccagggtccaggcaaggggctggagtgggtctcaagcattggtagtgccaatagcacatattatgcagactccgtgaagggccggttcaccatctccagagacaactccaagaaaatactgtatctacaagtgagcagcctgagagtcgaggacacggccttatattactgtgcgagaggtcctcagtgtactagtgtcggttgctacgtcgtgggggctttggacgtctggggccaagggaccacagtcaccgtccgcccag

SEQ ID NO: 55 - DNA, 364 bp, Artificial Sequence
  Description of Artificial Sequence: Synthetic polynucleotide
caggtgcagctggtggagtctgggggaggcgtggtccagcctgggaggtccctgagactctcctgtgcagcctctggattcaccttcagtagctatgctatgcactgggtccgccaggctccaggcaaggggctggagtgggtggcagttatatcatatgatggaagcaataaatactacgcagactccgtgaagggccgattcaccatctccagagacaattccaagaacacgctgtatctgcaaatgaacagcctgagagctgaggacacggctgtgtattactgtgcgagagctaggggtgggagctacgctggtggctttgatatctggggccaagggacaatggtcaccgtctcttcag

SEQ ID NO: 56 - DNA, 364 bp, Artificial Sequence
  Description of Artificial Sequence: Synthetic polynucleotide
caggtgcagctggtggagtctgggggaggcgtggtccagcctgggaggtccctgagactctcctgtgcagcctctggattcaccttcagtagctatgctatgcactgggtccgccaggctccaggcaaggggctggagtgggtggcagttatatcatatgatggaagcaataaatactacgcagactccgtgaagggccgattcaccatctccagagacaattccaagaacacgctgtatctgcaaatgaacagcctgagagctgaggacacggctgtgtattactgtgcgagaacgtatagtgggagctactgggatgcttttgatatctggggccaagggacaatggtcaccgtctcttcag

SEQ ID NO: 57 - DNA, 364 bp, Artificial Sequence
  Description of Artificial Sequence: Synthetic polynucleotide
caggtgcagctggtggagtctgggggaggcgtggtccagcctgggaggtccctgagactctcctgtgcagcctctggattcaccttcagtagctatgctatgcactgggtccgccaggctccaggcaaggggctggagtgggtggcagttatatcatatgatggaagcaataaatactacgcagactccgtgaagggccgattcaccatctccagagacaattccaagaacacgctgtatctgcaaatgaacagcctgagagctgaggacacggctgtgtattactgtgcgaggacgtatagtgggagctactattcctactttgactactggggccagggaaccctggtcaccgtctcctcag

SEQ ID NO: 58 - DNA, 364 bp, Artificial Sequence
  Description of Artificial Sequence: Synthetic polynucleotide
caggtgcagctgcaggagtcgggcccaggactggtgaagccttcggggaccctgtccctcacctgcgctgtctctggtggctccatcagcagtagtaactggtggagttgggtccgccagcccccagggaaggggctggagtggattggggaaatctatcatagtgggagcaccaactacaacccgtccctcaagagtcgagtcaccatatcagtagacaagtccaagaaccagttctccctgaagctgagctctgtgaccgccgcggacacggccgtgtattactgtgcgaggtgggggagtggctggtccaatgatgcttttgatatctggggccaagggacaatggtcaccgtctcttcaa

SEQ ID NO: 59 - DNA, 364 bp, Artificial Sequence
  Description of Artificial Sequence: Synthetic polynucleotide
caggtgcagctggtggagtctgggggaggcgtggtccagcctgggaggtccctgagactctcctgtgcagcctctggattcaccttcagtagctatgctatgcactgggtccgccaggctccaggcaaggggctggagtgggtggcagttatatcatatgatggaagcaataaatactacgcagactccgtgaagggccgattcaccatctccagagacaattccaagaacacgctgtatctgcaaatgaacagcctgagagctgaggacacggctgtgtattactgtgcgaggccacacggtgggagctactactcgtactttgactactggggccagggaaccctggtcaccgtctcctcag

SEQ ID NO: 60 - DNA, 370 bp, Artificial Sequence
  Description of Artificial Sequence: Synthetic polynucleotide
gaagtgcagctggtgcagtctggagcagaggtgaaaaagcccggggagtctctgaggatctcctgtaagggttctggatacagctttaccagctactggatcagctgggtgcgccagatgcccgggaaaggcctggagtggatggggaggattgatcctagtgactcttataccaactacagcccgtccttccaaggccacgtcaccatctcagctgacaagtccatcagcactggctacctgcagtggagcagcctgaaggcctcggacaccgccatgtattactgtgcgagacattttccccgaacccagtggctgccatgggggttcgacccctggggccagggaaccctggtcaccgtctcctcag

SEQ ID NO: 61 - DNA, 378 bp, Artificial Sequence
  Description of Artificial Sequence: Synthetic polynucleotide
gaggtgcagctggtggagtctgggggaggcctggtcaagcctggggggtccctgagactctcctgtgcagcctctggcttcaccttcagtgcctatttcatgaactgggtccgccaggctccagggaaggggctggagtgggtcgcatccgttgaaagtagtggccgtcagaaatcctacgcagactcagtgaagggccgattcaccatctccagagacaacgccaagaattcagtctttctgcacatggcgagcctgagagccgaggacacggctatttattactgtgcgagagaggggattacgagttttggagtcgttacacactattacgctctggacgtctggggccaagggaccacggtcaccgtctcttca

SEQ ID NO: 62 - DNA, 378 bp, Artificial Sequence
  Description of Artificial Sequence: Synthetic polynucleotide
gaggtgcagctggtggagtctgggggaggcctggtcaagccgggggggtccctgagactctcctgtgcagcctctggcttcaccttcagtgcctatttcatgaactgggtccgccaggctccagggaaggggctggagtgggtcgcatccgttgaaagtagtggccgtcagaaatcctacgcagactcagtgaagggccgattcaccatctccagagacaacgccaagaattcagtctttctgcacatggcgcccctgagagccgaggacacggctatttattactgtgcgagagaggggattacgaattttggagtcgttacacactattacgctctggacgtctggggccaagggaccacggtcaccgtctcttca

SEQ ID NO: 63 - DNA, 378 bp, Artificial Sequence
  Description of Artificial Sequence: Synthetic polynucleotide
gaggtgcagctggtggagtctgggggaggcctggtcaagccgggggggtccctgagactctcctgtgcagcctctggcttcaccttcagtgcctatttcatgaactgggtccgccaggctccagggaaggggctggagtgggtcgcgtccgttgaaagtggtggccgtcagaaatcctacgcagactcagtgaagggccgattcaccatctccagagacaacgccaaaaattcagtctttctgcacatggcgagcctgagagccgaggacacggctatttattactgtgcgagagaggggattacgagttttggaatcgttacacactattacgctctggacgtctggggccaagggaccacggtcaccgtctcttca

SEQ ID NO: 64 - DNA, 396 bp, Artificial Sequence
  Description of Artificial Sequence: Synthetic polynucleotide
caggtgcagctggtggagtctgggggaggcgtggtccagcctgggaggtccctgagactctgctgtgcagcctctggattcaccttcagtgactatggcatgcactgggtccgccaggctccaggcaaggggctggagtgggtggcagttataacatatgatggaagaaataaaaaacatgcagactccgtggagggccgattcaccatctccagagacaatccgacgaacacgttgtatcttcaaatgaacagcctgagagctgaggacacggctgtctattactgtgcgaaagaaaacagagataggaattacgattcttggagtggttcttatagtgactactactacggtatggacgtctggggccaagggaccacggtcaccgtctcctca

SEQ ID NO: 65 - DNA, 396 bp, Artificial Sequence
  Description of Artificial Sequence: Synthetic polynucleotide
caggtgcagctggtggagtctgggggaggcgtggtccagcctgggaggtccctgagactctcctgtgcagcctctggattcaacttcggcgactttggcatgcattgggtccgccaggctccaggcaaggggctggagtgggtggcagttatatcatatgagggaaggaataaaaatcatgcagactccgtgaggggccgattcaccatctccagagacaattcgaggaacatgctgtatcttcagatgaacagcctgagacgtggggacacggcagtgtattactgtgcgaaagaaaacagagatagaaattacgattcttggagtgcctcttatagtgactactactacggtatggacgtctggggccaagggaccacggtcaccgtctcctca

SEQ ID NO: 66 - DNA, 367 bp, Artificial Sequence
  Description of Artificial Sequence: Synthetic polynucleotide
caggtgcagctggtggagtctgggggaggcgtggtccagcctgggaggtccctgagactctcctgtgcagcgtctggattcaccttcagtagctatggcatgcactgggtccgccaggctccaggcaaggggctggagtgggtggcagttatatggtatgatggaagtaataaatactatgcagactccgtgaagggccgattcaccatctccagagacaattccaagaacacgctgtatctgcaaatgaacagcctgagagccgaggacacggctgtgtattactgtgcgagagactttatgtggaaagaccagctgctattcggttaccaatggggccagggaaccctggtcaccgtctcctcag

SEQ ID NO: 67 - DNA, 367 bp, Artificial Sequence
  Description of Artificial Sequence: Synthetic polynucleotide
caggtgcagctgcaggagtcgggcccagggctggtgaagccctcggggaccctgtctctcagctgcactgtctctggtgactccatcaatagcgataactggtggagttgggtccgccagcccccagggaaggggctggagtggattggggaaatctttcatactgggggcaccaattacaacccgtccctcaagagtcgagtcaccatttcagtggacaactccgaaaaccggttctccctgacactgacgtctgtgaccgccgcggacacggccgtgtattattgtgtgagattaacttatgttaattcgggctacaactacttcgacccctggggccagggaaccctggtcaccgtctcctcag

SEQ ID NO: 68 - DNA, 361 bp, Artificial Sequence
  Description of Artificial Sequence: Synthetic polynucleotide
caggtgcagctggtggagtctgggggaggcgtggtccagcctgggaggtccctgagactctcctgtgcagcctctggattcaccttcagtagctatgctatgcactgggtccgccaggctccaggcaaggggctggagtgggtggcagttatatcatatgatggaagcaataaatactacgcagactccgtgaagggccgattcaccatctccagagacaattccaagaacacgctgtatctgcaaatgaacagcctgagagctgaggacacggctgtgtattactgtgcgagaggaagggggagctacaacacgtactttgactactggggccagggaaccctggtcaccgtctcctcag

SEQ ID NO: 69 - DNA, 378 bp, Artificial Sequence
  Description of Artificial Sequence: Synthetic polynucleotide
gaggtgcagctggtggagtctgggggaggcctggtcaagtctgggggatccctgagactctcctgtacaggctctgggttcaccttcagtgcctatttcatgatctgggtccgccaggctccagggaagggactggagtgggtcgcatccattgacagtgctggcaggtccatcaattacgcagagtcagtgacgggccgattcaccatctcgagagacaacgccaagggatcatcgcatcttcaaatgaatcgcctgagagccgaggacacggctctatattactgtgcggcagagggaatttcggtttttggagtagttacacacttctacgctttggccgcctggggccaagggaccacggtcaccgtctcctca

SEQ ID NO: 70 - DNA, 367 bp, Artificial Sequence
  Description of Artificial Sequence: Synthetic polynucleotide
caggtacagctgcagcagtcaggtcccgcggccctagacctcatcctcacatgtgctctgtcgggcgaccgtgccactagcaacagtgctgcttggaactggatcaggcagtccccatcgagaggccttgagtggctgggaaggacatactacaggtccaagtggtataatgattatgcactatctgtgaaaagtcgaataaccatcaacccagacacatccaagaaccagttctccctgcagctgaactctgtgactcccgaggacacggctgtgtattactgtgcaagaggcccttctactaggccctcttgttaccacggatttgtctgctgaggcccggcaagcatcgcctccggcacagcat

SEQ ID NO: 71 - DNA, 361 bp, Artificial Sequence
  Description of Artificial Sequence: Synthetic polynucleotide
caggtgcagctggtgcagtctggggctgaggtgaagaagcctggggcctcagtgaaggtctcctgtaggccctctggattcaccctcaccgactactctgttcactgggtgcgacaggcccctggtcaagggcttgagtggatgggacggatcaactctaacggcggtgacacacagtctgcacagaagtttcaaggcagggtcgccatgaccagggacacgtccatcagaacagcctacatggagctgcacaacctgaaatctgacgacacggccgtgtattattgtgcgaggtccgggggcctggggatcttggcttttgatttgtggggccaagggacaatggtcaccgtcttctcag

SEQ ID NO: 72 - DNA, 358 bp, Artificial Sequence
  Description of Artificial Sequence: Synthetic polynucleotide
caggtgcagctggtggagtctgggggaggcgtggtccagcctgggaggtccctgagactctcctgtgcagcgtctggattcaccttcagtaactatggcatgcactgggtccgccaggctccaggcaaggggctggagtgggtggcagttatatggtatgatggaagtaataaatactatgcagactccgtgaggggccgattcaccatctccagagacaattccaagaacacactgtttctgcaaatgaacagcctgagagccgaggacacggctgtttattactgtgcgagagcccccggggggggggacctagggttctactggggccagggaaccctggtcaccgtctcctcag

SEQ ID NO: 73 - DNA, 370 bp, Artificial Sequence
  Description of Artificial Sequence: Synthetic polynucleotide
caggtgcagctggtgcagtctggggctgaggtgaagaagcctggggcctcagtgaaggtctcctgcaaggcttctgaagacaccttcagcgactactatatgcactgggtgcgacaggcccctggacaagggcttgagtggatgggacggatcaaccctgcgactggtgacacaaactgtgctcagaaatttcagggcagggtcaccatgaccagggactcgtccatcagcacagcctacatggagttgagcagactgacatttgacgacacggccgtctattactgtgcgagccccaagacagactcaactggatcgactctgcctcttttcgactggggccagggaaccctggtcaccgtctcctcag

SEQ ID NO: 74 - DNA, 373 bp, Artificial Sequence
  Description of Artificial Sequence: Synthetic polynucleotide
caggtgcagctggtggagtctgggggaggcgtggtccagcctgggaggtccctgagactctcctgtgcagcgtctggattcaccttcagtagctatggcatgcactgggtccgccaggctccaggcaaggggctggagtgggtggcagttatatggtatgatggaagtaataaatactatgcagactccgtgaagggccgattcaccatctccagagacaattccaagaacacgctgtatctgcaaatgaacagcctgagagccgaggacacggctgtgtattactgtgcgagagatcgtccgttccccagcagctggtttggggaggactttgactactggggccagggaaccctggtcaccgtctcctcag

SEQ ID NO: 75 - DNA, 393 bp, Artificial Sequence
  Description of Artificial Sequence: Synthetic polynucleotide
caggtgcagctggtgcagtctggggctgaggtgaagaagcctgggtcctcggtgaaggtctcctgcaaggcttctggaggcaccttcagcagctatgctatcagctgggtgcgacaggcccctggacaagggcttgagtggatgggagggatcatccctatctttggtacagcaaactacgcacagaagttccagggcagagtcacgattaccgcggacgaatccacgagcacagcctacatggagctgagcagcctgagatctgaggacacggccgtgtattactgtgcgaaaaccttttacgatttttggagtggttattgggattccggggactactactactacggtatggacgtctggggccaagggaccacggtcaccgtctcctca

SEQ ID NO: 76 - DNA, 319 bp, Artificial Sequence
  Description of Artificial Sequence: Synthetic polynucleotide
gacatccagatgacccagtctccatcctccctgtctgcatctgttggagacagagtcaccatcacttgccaggcgagtcaggacatcaggaactatttgaattggtggcagcagaagccagggaaagcccctaacctcctgatttacgacgagtccaatctggaagcaggggtcccgtcaagattcagtggaactggatctgggacagatttcactctcaccatcagcagcctgcagcctgaagacattgcaacatattattgtcaacagtatgatgatctttggacgttcggccaagggaccaaggtggaaatcaagc

SEQ ID NO: 77 - DNA, 325 bp, Artificial Sequence
  Description of Artificial Sequence: Synthetic polynucleotide
gaaattgtgttgacgcagtctccaggcaccctgtctttgtctccaggggaaagagccaccctctcctgcagggccagtcagagtgtttacagcggctccttagcctggtaccagcagagacctggccaggctcccaggctcctcatctatggtgcatccagcaggaccactggcatcccagacaggttcagtggcagtgggtctgggacagacttcactctcaccatcaccagactggagcctgaagattttgcagtttattactgtcagcactatggtacctcaccgtacacttttggccaggggaccaagctggagatcaaac

SEQ ID NO: 78 - DNA, 325 bp, Artificial Sequence
  Description of Artificial Sequence: Synthetic polynucleotide
tcctatgagctgacacagccaccctcggtgtcagtgtacccaggacagacggccaggatcacctgctctggagatgaattgccaacagaatatgcctcttggtaccagcagaagccaggccaggcccctgtcttggtaatatataaggacattgagaggccctcagggattcctgagcgattctctggctccacctcagggacaacagtcacgttgaccatcagtggagtccaggcagaggacgaggctgactattattgtctatcaccagacaacagtggtacttatcgggtatttggcggagggaccaagctgaccgtcctag

SEQ ID NO: 79 - DNA, 322 bp, Artificial Sequence
  Description of Artificial Sequence: Synthetic polynucleotide
gacatccagatgacccagtctccatcctccctgtctgcatctgtaggagacagagtcaccatcacttgccaggcgagtcaggacattagcaactatttaaattggtatcagcagaaaccagggaaagcccctaagctcctgatctacgatgcatccaatttggaaacaggggtcccatcaaggttcagtggaagtggatctgggacagattttactttcaccatcagcagcctgcagcctgaagatattgcaacatattactgtcaacagtatgataatctcccgctcactttcggcggagggaccaaggtggagatcaaac

SEQ ID NO: 80 - DNA, 325 bp, Artificial Sequence
  Description of Artificial Sequence: Synthetic polynucleotide
gaaattgtgttgacgcagtctccaggcaccctgtccttgtctccaggggaaagagccaccctctcctgcagggccagtcagagtgtcagcaacagctacttagcctggtaccagcagaaacctggccaggctcccaggctcctcatctatggtgcatccagcagggccactggcatcccagacaggttcagtggcagtgggtctgggacagacttcactctcaccatcagcagactggagcctgatgattttgcagtgtattactgtcagcagtatgatagctcaccgtacgcttttggccaggggaccaccctggagatcaaac

SEQ ID NO: 81 - DNA, 322 bp, Artificial Sequence
  Description of Artificial Sequence: Synthetic polynucleotide
gacatccagatgacccagtctccatcctccctgtctgcatctgtaggagacagagtcaccatcacttgccgggcaagtcagtacattagcagctctttaaattggtatcagcagaaaccagggaaagcccctaagctcctgatctatgctgcatccagtttgcaaagtggggtcccatctaggttcagtggcagtggatctgggacagatttcactctcaccatcagcagtctgcaacttgaagatcttgcaacttacttctgtcaacagagttccattacccctcggacgttcggccaagggaccaaggtggaaatcaaac

SEQ ID NO: 82 - DNA, 319 bp, Artificial Sequence
  Description of Artificial Sequence: Synthetic polynucleotide
gacatccagatgacccagtctccatcctccctgtctgcatctgttggagacagagtcaccatcacttgccaggcgagtcaggacatcaggaactatttgaattggtggcagcaaaagccagggaaagcccctaacctcctgatttacgacgagtccaatctggaagcaggggtcccgtcaagattcagtggaactggatctgggacagatttcactctcaccatcagcagcctgcagcctgaagacattgcaacatattattgtcaacagtatgatgatctttggacgttcggccaagggaccaaggtggaaatcaagc

SEQ ID NO: 83 - DNA, 325 bp, Artificial Sequence
  Description of Artificial Sequence: Synthetic polynucleotide
tcctatgagctgacacagccaccctcggtgtcagtgtccccaggacagacggccaggatcacctgctctggagatgcattgccagaggaatatgcttattggtaccagcagaagccaggccaggcccctgttttactgatatataaagacagtgagaggccctcagggatccctgagcgattctctggctccagctcagggacaacagtcacgttgacgatcagtggagtcgaggcacaagatgaggctgactattactgtcaatcagtagacagcagtggtccttatcgggtgttcggcggagggaccaagctgaccgtcctag

SEQ ID NO: 84 - DNA, 322 bp, Artificial Sequence
  Description of Artificial Sequence: Synthetic polynucleotide
gacatccagatgacccagtctccttccaccctgtctgcatctgtaggagacagagtcaccatcacttgccgggccagtcccagtattagtccctggttggcctggtatcagcagaaaccagggaaagcccctaaactcctgatctataaggcatctactttagaaactggggtcccatcaagattcagcggcagtgggtctgggacagatttcactctcaccatcaccagcctgcagcctgatgactctgcaacttattactgccaacactatgacagtctttctcggacgttcggccaagggaccagggtggaaatcaaac

SEQ ID NO: 85 - DNA, 325 bp, Artificial Sequence
  Description of Artificial Sequence: Synthetic polynucleotide
tcctatgagctgacacagccactctcggtgtcagtgtccccaggacagacggccaggatcacctgttctggagatgcattgtcagaggaatacattcattggtaccagcagaggccaggccaggcccctgttttggttatatataaggacactgagaggccctcagggatccctgagcgattctctggctccagctcagggacaacagtcacgttgaccatcagtggagtccaggcagaagacgaggctgactattattgtcaatcaccagacagcacttctacttatcgggtcttcggcggagggaccaagctgaccgtcctag

SEQ ID NO: 86 - DNA, 325 bp, Artificial Sequence
  Description of Artificial Sequence: Synthetic polynucleotide
tcctatgagctgacacagccaccctcggtgtcagtgtccccaggacagacggccaggatcacctgctctggagatgcattgccagaggaatatgcttattggtacaagcagaagccaggccaggcccctgttttactgatatataaagacagtgagaggccctcagggatccctgagcgattctctggctccagctcagggacaacagtcacgttgacgatcagtggagtcgaggcagaagatgaggctgactattactgtcaatcagtagaaactagtggtccttatcgggtgttcggcggagggaccaagctgaccgtcctag

SEQ ID NO: 87 - DNA, 325 bp, Artificial Sequence
  Description of Artificial Sequence: Synthetic polynucleotide
tcctatgagctgacacagccaccctcgatgtcagtgtccccaggacagtcggccagcatcacctgctctggagatgcattggcaaacgaatatactcattggtaccagcagaagccaggccaggcccctgtgttggtgatatataaggacactgaaaggccctcagggatccctgagcgattctctggctccagctcagggacaacagtcacgttgaccatcagtggagtccaggcagaagacgaggctgactattattgtcaatcaccagacagcagtggtacttatcgggtattcggcggagggaccaagctgaccgtcctcg

SEQ ID NO: 88 - DNA, 322 bp, Artificial Sequence
  Description of Artificial Sequence: Synthetic polynucleotide
tcctatgagctgacacagccaccctcggtgtcagtgtccccaggacagacggccagggtcacctgctctggagatgcattgccaaagcaatttgcttattggtaccagcagaagccaggccaggcccctgtggtggtgatatataaagacagtgagaggccctcagggatccctgagcgattctctggctccagctcagggacaacagtcacgttgaccatcagtggagtccaggcagaagacgaggctgactattattgtcaatcagcagacagcagtggtacttatgtgttcggaagtgggaccaaggtcaccgtcctac

SEQ ID NO: 89 - DNA, 325 bp, Artificial Sequence
  Description of Artificial Sequence: Synthetic polynucleotide
tcctatgagctgacacagccaccctcggtgtcagtgtccccaggacagacggccaggatcacctgctctggagatgcattgccagaggaatatgcttattggtaccagcagaagccaggccaggcccctgtgttactgatatataaagacagtgagaggccctcagggatccctgagcgattctctggctccagctcagggacaacagtcacattgacgatcagtggagtcgaggcagaagatgaggctgactattactgtcaatcagtagacagcagtggtccttatcgggtgttcggcggagggaccaagctgaccgtcctag

SEQ ID NO: 90 - DNA, 325 bp, Artificial Sequence
  Description of Artificial Sequence: Synthetic polynucleotide
tcctatgagctgacacagccaccctcgatgtcagtgtccccaggacagtcggccaggatcacctgctctggagatgaattggctatcgaatatactcattggtaccaacagaagccaggccaggcccctgtgttggtgatatttaaggacactgagaggccctcagggatccctgagcgattctctggttccagctcagggacaatagccacgttgactatcagtggagtccaggcagaagacgaggctgactattattgtcaatcaccagacagcagtggtacttatcgcgtattcggcggcgggaccaagctgaccgtcttga

SEQ ID NO: 91 - DNA, 325 bp, Artificial Sequence
  Description of Artificial Sequence: Synthetic polynucleotide
tcctatgagctgacacagccaccctcggtgtcagtgtccccaggacagacggccaggatcagctgctctggagatgcattgccagaggaatatgcttattggtaccagcagaagccaggccaggtccctgtgttactgatatataaagacagtgagaggccctcagggatccctgagcgattctctggctccagctcagggacaacagtcacgttgacgatcagtggagtcgaggcagaagatgaggctgactattactgtcaatcagtagacagcagtggtccttatcgggtgttcggcggggggaccaagctgaccgtcctaa

SEQ ID NO: 92 - DNA, 340 bp, Artificial Sequence
  Description of Artificial Sequence: Synthetic polynucleotide
gacatcgtgatgacccagtctccagactccctggctgtgtctctgggcgagagggccaccatcaactgcaagtccagccagagtattttatacaggtccaacaataagaattacttagcttggtaccaccagaaaccgggacagccccctaagctgctcatttcctgggcatttacccgggaatccggggtccctgaccgattcagtggcagcgggtctgggacagatttcactctcaccatcagcggcctgcaggctgaggatgtggcagtttattactgtcaacaatattatagtagtccgtacacttttggccaggggaccaagctggagatcaaac

SEQ ID NO: 93 - DNA, 325 bp, Artificial Sequence
  Description of Artificial Sequence: Synthetic polynucleotide
tcctatgagctgacacagccaccctcggtgtcagtgtccccaggacaaacggccaggatcacctgctctggagatgcattgcctaagaagtacgcttattggtaccagcagaggccaggccaggcccctgtgttggtcatccatgaggacaccaaacgaccctccgggactcctgagagattctctggctccagctcagggacagtggccaccttgacaatcactggggcccaggtggaagatgaagctgactactactgttactcaacagacatcagtggtgatcagtatgtcttcggaactgggaccaaggtcaccgtcctaa

SEQ ID NO: 94 - DNA, 325 bp, Artificial Sequence
  Description of Artificial Sequence: Synthetic polynucleotide
gaaattgtgttgacgcagtctccaggcaccctgtccttgtctccaggggaaagagccaccctctcctgcagggccagtcagagtgtcagtcacaattacttagcctggtaccagcagaagcctggccaggctcccaggctcgtcatctatggagtatccaacagggccgctggcatcccagacaggttcagtggcagtgggtctggggcagacttcactctcaccatcggcagactggagcctgaagattttgcagtgtattactgtcagcagtatggcgtctcaccgtacacttttggccaggggaccaccctggagatcaagc

SEQ ID NO: 95 - DNA, 325 bp, Artificial Sequence
  Description of Artificial Sequence: Synthetic polynucleotide
tcctatgagctgacacagccaccctcggtgtcagtgtccccaggacagacggccaggatcacctgctctggagatgcattgccagaggaatatgcttattggtaccaacagaagccaggccaggcccctgtgttattgatatataaagacagtgagaggccctcagggatccctgagcgattctctggctccagctcagggacaacagtcacgttgacgatcagtggagtcgaggcagaagatgaggctgactattactgtcaatcagtagacagcagtggtccttatcgcgtgttcggcggagggaccaagctgaccgtcctag

SEQ ID NO: 96 - DNA, 562 bp, Artificial Sequence
  Description of Artificial Sequence: Synthetic polynucleotide
gacatccagatgacccagtctccatcctccctgtctgcatctgttggagacagagtcaccatcacttgccaggcgagtcaggacatcaggaactatttgaattggtggcagcagaagccagggaaagcccctaacctcctgatttacgacgagtccaatctggaagcaggggtcccgtcaagattcagtggaactggatctgggacagatttcactctcaccatcagcagcctgcagcctgaagacattgcaacatattattgtcaacagtatgatgatctttggacgttcggccaagggaccaaggtggaaatcaagcgaactgtggctgcaccatctgtcttccttccttcccacaatctagggaaagcccctaatctcaggattcctcacgagtccaatctggaagcaggggtcccgtcaagattcagtggaactggatctgggacagatttcactctcaccatcagcagcctgcagcctgaagacattgcaacatattattgtcaacagtatgatgatctttggacgttcggccaagggaccaaggtggaaatcaagc

SEQ ID NO: 97 - DNA, 319 bp, Artificial Sequence
  Description of Artificial Sequence: Synthetic polynucleotide
gacatccagatgacccagtctccatcctccctgtctgcatctgttggagacagagtcaccatcacttgccaggcgagtcaggacatcaggaactatttgaattggtggcagcagaagccagggaaagcccctaacctcttgatttacgaggagtccaatctggaagcaggggtcccgtcaagattcagtggaactggatctgggacagatttcactctcaccatcagcagcctgcagcctgaagacattgcaacatattattgtcaacagtatgatgatctttggacgttcggccaagggaccaaggtggaaatcaagc

SEQ ID NO: 98 - DNA, 322 bp, Artificial Sequence
  Description of Artificial Sequence: Synthetic polynucleotide
gacatccagatgacccagtctccatcctccctgtctgcatctgtaggagacagagtcaccatcacttgccgggcaagtcagagcattagcagctatttaaattggtatcagcagaaaccagggaaagcccctaagctcctgatctatgctgcatccagtttgcaaagtggggtcccatcaaggttcagtggcagtggatctgggacagatttcactctcaccatcagcagtctgcaacctgaagattttgcaacttactactgtcaacagagttacagtacccggtggacgttcggccaagggaccaaggtggaaatcaaac

SEQ ID NO: 99 - DNA, 325 bp, Artificial Sequence
  Description of Artificial Sequence: Synthetic polynucleotide
tcctatgagctgacacagccactctcggtgtcagtgtccccaggacagacggccaggatcacttgttctggagatacattgtcagaagaatacactcattggtaccagcaaaaaccaggccaggcccctattttggtgatatataaggacactgagaggccctcagggatccctgagcgattctctgggtccagctcagggacaacagtcaccttgaccatcagtggagtccaggcagaggacgaggctgactattattgtcaatcaccagacaccacttctacttatcgggtcttcggcggagggaccaagttgaccgtcctag

SEQ ID NO: 100 - DNA, 325 bp, Artificial Sequence
  Description of Artificial Sequence: Synthetic polynucleotide
tcctatgagctgacacagccactctcggtggcagtggccccaggagagacggccaggatcacctgttctggagatgcattgtcagaggaatatactcactggtaccagcagaggccaggccaggcccctgttttgattatatataaggacactgagaggccctcagggatccctgagcgattctctggctccacctcagggacaacagtcacgttgaccatcagtggagtccaggcagaagacgaggctgactattattgtcaatcaccggacaccacttctacttatcgggtcttcggcggagggaccaagctgaccgtcctag

SEQ ID NO: 101 - DNA, 325 bp, Artificial Sequence
  Description of Artificial Sequence: Synthetic polynucleotide
tcctatgagctgacacagccactctcggtgtcagtgtccccaggacagacggccaggatcacttgttctggagatgcattgtcagaggaatatactcattggtaccagcagaggccaggccaggcccctattttggtgatatataaggacactgagaggccctcagggatccctgagcgattctctggctccagctcagggacaacagtcaccttgaccatcagtggagtccaggcagaggacgaggctgactattattgtcaatcaccagacagcacttctacttatcgggtcttcggcggagggaccaggttgaccgtcctag

SEQ ID NO: 102 - DNA, 319 bp, Artificial Sequence
  Description of Artificial Sequence: Synthetic polynucleotide
gaaattgtgttgacacagtctccagccaccctgtctttgtctccaggggaaagagccaccctctcctgcagggccagtcagagtgttagcaggtacttagcctggtaccaacagaaacctggccaggctccccggctcctcatctatgatgcatccaagagggccactggcatcccagccaggttcagtggcagtgggtctgggacagacttcactctcagcatcagcagcctggagcctgaagattttgcagtttattactgccagcagcgtgacaactggccctccttcggcggagggaccaaggtggagatcaagc

SEQ ID NO: 103 - DNA, 322 bp, Artificial Sequence
  Description of Artificial Sequence: Synthetic polynucleotide
tcttctgagctgactcaggaccctactgtgtctgtggccttgggacagacagtcacgattacatgccaaggagacagcctcagacactattatgcaagttggtaccggcagaagccaggacaggcccctttacttgtcctctatgataaaatcaggcggccctcagggatcccagaccgattctctggctccagctcaggagacacaggctccttgaccatcactggggttcaggcggaagatgaggctgactattactgtaactcccgggacaccaatggtaatcgagtattcggcggagggaccaagctgaccgtcttag

SEQ ID NO: 104 - DNA, 322 bp, Artificial Sequence
  Description of Artificial Sequence: Synthetic polynucleotide
gaaattgtgctgactcagtctccagactttcagtctgtgagtccaaaggagaaagtcaccatcacctgccgggccagtcagagcattggtagtagcttacactggtaccagcagaagccagatcagtctccaaagctcctcatcaagtatgcttcccagtccctctcaggggtcccctcgaggttcagtggcagtggatctgggacagatttcaccctcaccatcaatagcctggaagttgaagatggtgcaacgtattactgtcatcagagtagtagtttccctcgaacgttcggccaagggaccaaggtggaaatcaaac

SEQ ID NO: 105 - DNA, 331 bp, Artificial Sequence
  Description of Artificial Sequence: Synthetic polynucleotide
cagtctgtgctgactcagccaccctcagcgtctgggacccccgggcagagggtcaccatctcttgttctggaagcagctccaacatcggaagtaattatgtatactggtaccagcagctcccaggaacggcccccaaactcctcatctataggaataatcagcggccctcaggggtccctgaccgattctctggctccaagtctggcacctcagcctccctggccatcagtgggctccggtccgaggatgaggctgattattactgtgcagcatgggatgacagcctgagtggtcacgtgttcggcggagggaccaagctgaccgtcctag

SEQ ID NO: 106 - DNA, 325 bp, Artificial Sequence
  Description of Artificial Sequence: Synthetic polynucleotide
gacatccagatgacccagtctccatcctccctgtctgcatctgtaggagacagagtcaccatcacttgccgggcgagtcagggcattagcaattctttagcctggtatcagcagaaaccagggaaagcccctaagctcctgctctatgctgcatccagattggaaagtggggtcccatccaggttcagtggcagtggatctgggacggattacactctcaccatcagcagcctgcagcctgaagattttgcaacttattactgtcaacagtattatagtaccctcgggaggacgttcggccaagggaccaaggtggaaatcaaac

SEQ ID NO: 107 - DNA, 340 bp, Artificial Sequence
  Description of Artificial Sequence: Synthetic polynucleotide
gacatcgtgatgacccagtctccagactccctggctgtgtctctgggcgagagggccaccatcaactgcaagtccagccagagtgttttatacagctccaacaataagaactacttagcttggtaccagcagaaaccaggacagcctcctaagctgctcatttactgggcatctacccgggaatccggggtccctgaccgattcagtggcagcgggtctgggacagatttcactctcaccatcagcagcctgcaggctgaagatgtggcagtttattactgtcagcaatattatagtactccgctcactttcggcggagggaccaaggtggagatcaaac

SEQ ID NO: 108 - DNA, 325 bp, Artificial Sequence
  Description of Artificial Sequence: Synthetic polynucleotide
gaaattgtgttgacacagtctccagccaccctgtctttgtctccaggggaaagagccaccctctcctgcagggccagtcagagtgttagcagctacttagcctggtaccaacagaaacctggccaggctcccaggctcctcatctatgatgcatccaacagggccactggcatcccagccaggttcagtggcagtgggtctgggacagacttcactctcaccatcagcagcctagagcctgaagattttgcagtttattactgtcagcagcgtagcaactggcctccgtggacgttcggccaagggaccaaggtggaaatcaaac

SEQ ID NO: 109 - DNA, 322 bp, Artificial Sequence
  Description of Artificial Sequence: Synthetic polynucleotide
gacatccagatgacccagtctccatcctccctgtctgcatctgtaggagacagagtcaccatcacttgccgggcaagtcagagcattagcagctatttaaattggtatcagcagaaaccagggaaagcccctaagctcctgatctatgctgcatccactttgcaaagtggggtcccatcaaggttcagtggcagtggatctgggacagatttcactctcaccatcagctgcctgcagtctgaagattttgcaacttattactgtcaacagtattatagtttccctccgacgttcggccaagggaccaaggtggaaatcaaac

SEQ ID NO: 110 - DNA, 319 bp, Artificial Sequence
  Description of Artificial Sequence: Synthetic polynucleotide
gaaattgtgttgacacagtctccagccaccctgtctttgtctccaggggaaagagccaccctctcctgcagggccagtcagagtgttagcagctacttagcctggtaccaacagaaacctggccaggctcccaggctcctcatctatgatgcatccaacagggccactggcatcccagccaggttcagtggcagtgggtctgggacagacttcacgctcaccatcagcagcctacagtctgaagattttgcactttattattgtcagcagtataataactggctcactttcggcggagggaccaaggtggcgatcaaac

SEQ ID NO: 111 - DNA, 322 bp, Artificial Sequence
  Description of Artificial Sequence: Synthetic polynucleotide
gacatccagatgacccagtctccatcctccctgtctgcatctgtaggagacagagtcaccatcacttgccgggcagggcagatcattggtacttatttaaattggtatcagcagagaccagggaaagccccgatgctcctgatctatgctgcatcgaacttacacagtggcgtcccatccaggttcagtggcagtggatctgggacagatttcactctcaccatcgacagtctgcaacctgaagactttgcaacttactactgtcaacagacttacagtacccctcgaacttttggcccggggaccaagctggagatcaaac

SEQ ID NO: 112 - DNA, 331 bp, Artificial Sequence
  Description of Artificial Sequence: Synthetic polynucleotide
tcctatgtgctgactcagccaccctcagtgtcagtggccccaggaaagacggccaggattacctgtgggggaaacaacattggaagtaaaagtgtgcactggtaccagcagaagccaggccaggcccctgtgctggtcatctattatgatagcgaccggccctcagggatccctgagcgattctctggctccaactctgggaacacggccaccctgaccatcagcagggtcgaagccggggatgaggccgactattactgtcaggtgtgggatagtagtagtgatcatcctaattatgtcttcggaactgggaccaaggtcaccgtcctag

SEQ ID NO: 113 - DNA, 325 bp, Artificial Sequence
  Description of Artificial Sequence: Synthetic polynucleotide
gaaattgtgttgacacagtctccagccaccctgtctctgtctccaggggatagagccaccctctcctgcaggtccagtcaaactgttgatatctacgtaggctggtatcaacagaaacctggccagcctcccaggctcctcatctatgatgcttccaacagggcccctggcgtccctgccaggttcagtggctctgggtcagggacagacttcactctcaccatcagcagcctagagcctgaagactttgcagtttatttctgtcagcagcgtaagagctggcctccgctcactttcggcggagggaccaaggtagagatgaaac

SEQ ID NO: 114 - DNA, 328 bp, Artificial Sequence
  Description of Artificial Sequence: Synthetic polynucleotide
gaaattgtgttgacgcagtctccaggcaccctgtctttgtctccaggggaaagagccaccctctcctgcagggccagtcagagtgttagcagcagctacttagcctggtaccagcagaaacctggccaggctcccaggctcctcatctatggtgcatccagcagggccactggcatcccagacaggttcagtggcagtgggtctgggacagacttcactctcaccatcagcagactggagcctgaagattttgcagtgtattactgtcagcagtatggtagctcacccttccccgctttcggcggagggaccaaggtggagatcaaac

SEQ ID NO: 115 - DNA, 322 bp, Artificial Sequence
  Description of Artificial Sequence: Synthetic polynucleotide
gaaatagtgatgacgcagtctccagccaccctgtctgtgtctccaggggaaagagccaccctctcctgcagggccagtcagagtgttagcagcaacttagcctggtaccagcagaaacctggccaggctcccaggctcctcatctatggtgcatccaccagggccactggtatcccagccaggttcagtggcagtgggtctgggacagagttcactctcaccatcagcagcctgcagtctgaagattttgcagtttattactgtcagcagtataataactggccgggcactttcggccctgggaccaaagtggatatcaaac

SEQ ID NO: 116 - DNA, 322 bp, Artificial Sequence
  Description of Artificial Sequence: Synthetic polynucleotide
gacatccagatgacccagtctccatcctccctgtctgcatctgtgggagacagagtcaccatcacttgccggacaagtcagagcatcagaacttatttacattggtatcagcagaaaccagggaaagcccctaaactcctgatctatactgcatccagtttgcaaggtggggtcccatcaaggttcagtggcagtggatctgggacagatttcactctcaccatcagcagtctgcaacctgaagactttgcgtcttactactgtcaacagggttacactaccccgtacacttttggccaggggaccaagctggagatcaaac

SEQ ID NO: 117 - DNA, 331 bp, Artificial Sequence
  Description of Artificial Sequence: Synthetic polynucleotide
cagtctgtgctgactcagccaccctcagcgtctgggacccccgggcagagggtcaccatctcttgttctggaagcagctccaacatcggaagtaatactgtaaactggtaccagcagctcccaggaacggcccccaaactcctcatctatagtaataatcagcggccctcaggggtccctgaccgattctctggctccaagtctggcacctcagcctccctggccatcagtgggctccagtctgaggatgaggctgattattactgtgcagcatgggatgacagcctgaatggttgggtgttcggcggagggaccaagctgaccgtcctag

SEQ ID NO: 118 - DNA, 328 bp, Artificial Sequence
  Description of Artificial Sequence: Synthetic polynucleotide
gaaattgtgttgacgcagtctccaggcaccctgtctttgtctccaggggaaagagccaccctctcctgcagggccagtcagagtgttagcagcagctacttagcctggtaccagcagaaacctggccaggctcccaggctcctcatctatggtgcatccagcagggccactggcatcccagacaggttcagtggcagtgggtctgggacagacttcactctcaccatcagcagactggagcctgaagattttgcagtgtattactgtcagcagtatggtagctcaccgacgtggacgttcggccaagggaccaaggtggaaatcaaac

SEQ ID NO: 119 - DNA, 325 bp, Artificial Sequence
  Description of Artificial Sequence: Synthetic polynucleotide
tcctatgagctgacacagccaccctcggtgtcagtgtccccaggacaaacggccaggatcacctgctctggagatgcattgccaaaaaaatatgcttattggtaccagcagaagtcaggccaggcccctatagtggtcatctatgaggacaccaaacgaccctccgggatccctgagagattctctggctccagctcagggacaacggccaccttgactatcagtggggcccaggtggaggatgaagctgactactattgttactcaacagacagcagtggtaatcatagggtgttcggcggagggaccaagctgaccgtcctag

SEQ ID NO: 120 - DNA, 325 bp, Artificial Sequence
  Description of Artificial Sequence: Synthetic polynucleotide
gacatccagttgacccagtctccatccttcctgtctgcatctgtaggagacagagtcaccatcacttgccgggccagtcagggcattgacaggtatttagcctggtatcagcaaaaaccagggagtgcccctaaactcctcatctatgctgcatccactttgcaaagtggggtcccatcaaggttcagcggcagtggatctgagacagacttcactctcacaatcagcagcctgcagcctgacgattttgcaacttattactgtcaacagctcagtacttaccccacgatcaccttcggccaagggacacgactggagattaaac

SEQ ID NO: 121 - DNA, 331 bp, Artificial Sequence
  Description of Artificial Sequence: Synthetic polynucleotide
cagtctgccctgactcagcctccctccgtgtccgggtctcctggacagtcagtcaccatctcctgcactggaaccagcagtgacgttggtagttataaccgtgtctcctggtaccagcagcccccaggcacagcccccaaactcatgatttatgaggtcagtaatcggccctcaggggtccctgatcgcttctctgggtccaagtctggcaacacggcctccctgaccatctctgggctccaggctgaggacgaggctgattattactgcagctcatatacaagcagcagcacttatgtcttcggaactgggaccaaggtcaccgtcctag

SEQ ID NO: 122 - DNA, 325 bp, Artificial Sequence
  Description of Artificial Sequence: Synthetic polynucleotide
gacatccagttgacccagtctccatccttcctgtctgcatctgtaggagacagagtcaccatcacttgccgggccagtcagggcattggcagtttcttagcctggtatcagcaaaaaccagggagtgcccctaagctcctcatatatgctgcatccactttgcaaagtggggtcccatcaaggttcagcggcagtggatctgggacagagttcactctcacaattagcagcctgcagcctgacgattttgcaacttattactgtcaacagcttaatagttaccccacgatcaccttcggccaagggacacgactggagattaaac

SEQ ID NO: 123 - DNA, 334 bp, Artificial Sequence
  Description of Artificial Sequence: Synthetic polynucleotide
gaaattgtgttgacacagtctccagccaccctgtctttgtctccaggggaaagagccaccctctcctgcagggccagtcagagtcttagcagttacaattacttagcctggtaccaacagaaacctggccaggctcccaggctcctcatttatgctgcatccaagagggccactggcatcccagccaggttcagtggcagtgggtctgggacagacttcactctcaccatcagcagcctagagcctgaagattttgcagtttatttctgtcagcagcgcagcaacaggcctccggcgtggacgttcggccaagggaccaaggtggaaatcaaac

SEQ ID NO: 124 - DNA, 322 bp, Artificial Sequence
  Description of Artificial Sequence: Synthetic polynucleotide
tcctatgagctgacacagccaccctcgctgtcagtgtccccagggcagacggccaggatcacctgctctggacatgcattgccaacacagtatgcttattggtaccaacagaggacaggccaggcccctgttttgcttatatataaagacagtgagaggccctcaggggtccctgagcgattttctggctccagctcagggacaacagtcacgctgaccatcagtggagtccaggcagaagacgaggctgactattactgtcaatcacaagacggcagtggtattgtggtattcggcggagggaccaaggtgaccgtcctag

SEQ ID NO: 125 - DNA, 325 bp, Artificial Sequence
  Description of Artificial Sequence: Synthetic polynucleotide
gacatccagttgacccagtctccatccttcctgtctgcatctataggagacagagtcaccatcacttgccgggccagtcagggcattgacagttttttagcctggtatcagcaaaaaccagggagtgcccctaaactcctcatctatgctgcatccactttgcaaagtggggtcccatcaaggttcagcggcagtggatctgggacagagttcactctcacaatcagcggcctgcagcctgacgattttgcaacttattactgtcaacaacttaatagttaccccacgatcaccttcggccaagggacacgactggagattaaac

SEQ ID NO: 126 - DNA, 331 bp, Artificial Sequence
  Description of Artificial Sequence: Synthetic polynucleotide
cagtctgccctgactcagcctgcctccgtgtctgggtctcctggacagtcgatcaccatctcctgcactggaaccagcagtgacattggtatttatcagtatgtctcctggtaccaacaacacacagtcaaagcccccgtactcgtgatttatgaggtcactaaacggccctcaggagtctctgatcgcttctctggctccaagtctggcaacacggcctccctgactatttctggtctccagtctgaggacgaggctgattattactgcagctcatatacagccagcaacactctcgtcttcgggacagggaccaaggtcaccgtcctcg

SEQ ID NO: 127 - DNA, 322 bp, Artificial Sequence
  Description of Artificial Sequence: Synthetic polynucleotide
gacatccagatgacccagtctccatcctccctgtctgcatctgtaggagacagagtcaccatcacttgccgggcaagtcagagcattagcagctatttaaattggtatcagcagaaaccagggaaagcccctaagctcctgatctatgctgcatccagtttgcaaagtggggtcccatcaaggttcagtggcagtggatctgggacagatttcactctcaccatcagcagtctgcaacctgaagattttgcaacttactactgtcaacagagttacagtaccccgtacagttttggccaggggaccaagctggagatcaaac

SEQ ID NO: 128 - DNA, 325 bp, Artificial Sequence
  Description of Artificial Sequence: Synthetic polynucleotide
gaaattgtgttgacgcagtctccaggcaccctgtctttgtctccaggagaaagagccaccctctcctgcagggccagtcagagcgttagcagtagctccttagcctggtatcagcagaaacctggccaggctcccagactcctcatctttggtgcatccaccagggccactggcatcccagagaggttcagtggcagtgggtctgggacagacttcactctcaccatcagcagactggagcctgaagattttgcagtctattactgtcagcagtatgggacctcaccattcactttcggccctgggaccagcgtggatattaaag

SEQ ID NO: 129 - DNA, 340 bp, Artificial Sequence
  Description of Artificial Sequence: Synthetic polynucleotide
gacatcgtgatgacccagtctccagagtccctgaatgtgtctctgggcgagagggccaccatcaactgcaagtccagccagagtgttttatccagctccacccataagaactacttagcctggtaccagcagaaaccaggacagcctcctaaggtggtcatttactgggcatctagtcgagaatccggggtccctgaccgattcagtggcagcgggtctgggacagatttcactctcaccatcagcagcctgcaggctgaagatgtggcagtttattactgtcagcaatattatagtactcctcacagttttggccaggggaccaaggtggggatcaaac

SEQ ID NO: 130 - DNA, 325 bp, Artificial Sequence
  Description of Artificial Sequence: Synthetic polynucleotide
tcctatgagctgacacagccaccctcggtgtcagtgtccccaggacaaacggccaggatcacctgctctggagatgcattgccaaaaaaatatgcttattggtaccagcagatgtcaggccaggcccctgtagtggtcatctatgaggacaaaaaacggccctccgggatccccgagagattctctggctccagttcagggacaatggccaccttgactatcagtggggcccaggtggaggatgaaggtgactactattgtgcctcaacagacagcagtggtaatcatagggtattcggcggagggaccaagctgaccgtcctag

SEQ ID NO: 131 - DNA, 619 bp, Artificial Sequence
  Description of Artificial Sequence: Synthetic polynucleotide
tcctatgagctgacacagccaccctcggtgtcagtgtccccagggcagacggccaggatcacctgctctggagatagattgccaagtcaatatgcttattggtaccagcagaggacaggccaggcccctgttttaattatatataaagacactgagaggccggcaggggtccctgagcgattctctggctccagctcagggacaacagccacgttgaccatctgggttccaggttccactggtgaccagcttgtgctgactcaatcacaagacggcagtggtattgtggtattcggcggagggaccaaggtgaccgtcctaggtcagcccaaggctgccccctcggtcactctgttccaacccaagaggacaaaattgccaattcaatatgcttattggtaccagcagaggacaggccaggcccctgttttaattatatataaagacactgaaaggccggcaggggtccctgagcgattctctggctccagctcagggacaacagccacgctgaccatcagtggagtccaggcggaggacgaggctgactattattgtcaatcacaaaacggcagtggtattggggtattcggcggagggaccaaggtgaccgtcctag

SEQ ID NO: 132 - DNA, 319 bp, Artificial Sequence
  Description of Artificial Sequence: Synthetic polynucleotide
gacatccagatgacccagtctccttccaccctgtctgcatctgtaggagacagagtcaccatcacttgccgggccagtcagagtattagtagctggttggcctggtatcagcagaaaccagggaaagcccctaagctcctgatctataaggcgtctagtttagaaagtggggtcccatcaaggttcagcggcagtggatctgggacagaattcactctcaccatcagcagcctgcagcctgatgattttgcaacttattactgccaacagtataatagttattggacgttcggccaagggaccaaggtggaaatcaaac

SEQ ID NO: 133 - DNA, 322 bp, Artificial Sequence
  Description of Artificial Sequence: Synthetic polynucleotide
gaaattgtgttgacgcagtctccaggcaccctgtctttgtctccaggggaaagagccaccctctcctgcagggccagtcagagtgttagcagcagctacttagcctggtaccagcagaaacctggccaggctcccaggctcctcatctatggtgcatccagcagggccactggcatcccagacaggttcagtggcagtgggtctgggacagacttcactctcaccatcagcagactggagcctgaagattttgcagtgtattactgtcagcagtatggtagctcgtacagttttggccaggggaccaagctggagatcaaac

SEQ ID NO: 134 - DNA, 340 bp, Artificial Sequence
  Description of Artificial Sequence: Synthetic polynucleotide
gacatcgtgatgacccagtctccagactccctggctgtgtctctgggcgagagggccaccatcaactgcaagtccagccagagtgttttatacagctccaacaataagaactacttagcttggtaccagcagaaaccaggacagcctcctaagctgctcatttactgggcatctacccgggaatccggggtccctgaccgattcagtggcagcgggtctgggacagatttcactctcaccatcagcagcctgcaggctgaagatgtggcagtttattactgtcagcaatattatagtactctttacacttttggccaggggaccaagctggagatcaaac

SEQ ID NO: 135 - DNA, 325 bp, Artificial Sequence
  Description of Artificial Sequence: Synthetic polynucleotide
gaaattgtgttgacgcagtctccaggcaccctgtctttgtctccaggggaaagagccaccctctcctgcagggccagtcagagtgttagcagcagctacttagcctggtaccagcagaaacctggccaggctcccaggctcctcatctatggtgcatccagcagggccactggcatcccagacaggttcagtggcagtgggtctgggacagacttcactctcaccatcagcagactggagcctgaagattttgcagtgtatttctgtcagcagtttggtagctcaccgtgggcgttcggccaagggaccaaggtggaaatcaaac

SEQ ID NO: 136 - DNA, 331 bp, Artificial Sequence
  Description of Artificial Sequence: Synthetic polynucleotide
cagtctgccctgactcagcctgcctccgtgtctgggtctcctggacagtcgatcaccatctcctgcactggaaccagcagtgacgttggtttttatcagtatgtctcctggtaccaacaacacccagtcaaagcccccgtactcgtgatttatgaggtcactaaacggccctcaggagtttctgatcgcttctctggctccaagtctggcaacacggcctccctgactatttctggtctccagtctgaggacgaggctgattattactgcagctcatatacagccagcagcactctcgtcttcgggacagggaccaaggtcaccgtcctcg

SEQ ID NO: 137 - DNA, 331 bp, Artificial Sequence
  Description of Artificial Sequence: Synthetic polynucleotide
cagtctgccctgactcagcctgcctccgtgtctgggtctcctggacagtcgatcaccatctcctgcactggaaccagcagtgacgttggtatttatcagtatgtctcctggtaccaacaacacccagtcaaagcccccgtactcgtgatttatgaggtcactaaacggccctcaggagtttctgatcgcttctctggctccaagtctggcaacacggcctccctgactatttctggtctccagtctgaggacgaggctgattattactgcagctcatatacagccagcagcactctcgtcttcgggacagggaccaaggtcaccgtcctcg

SEQ ID NO: 138 - DNA, 331 bp, Artificial Sequence
  Description of Artificial Sequence: Synthetic polynucleotide
cagtctgccctgactcagcctgcctccgtgtctgggtctcctggacagtcgatcaccatctcctgcactggaaccagcagtgacattggtatttatcagtatgtctcctggtaccaacaacacacagtcaaagcccccgtactcgtgatttatgaggtcactaaacggccctcaggagtctctgatcgcttctctggctccaagtctggcaacacggcctccctgactatttctggtctccagtctgaggacgaggctgattattactgcagctcatatacagccaccaacactctcgtcttcgggacagggaccaaggtcaccgtcctcg

SEQ ID NO: 139 - DNA, 331 bp, Artificial Sequence
  Description of Artificial Sequence: Synthetic polynucleotide
cagtctgccctgactcagcctgcctccgtgtctgggtctcctggacagtcgatcaccatctcctgcactggaaccagcagtgacgttggtatttatcagtatgtctcctggtaccaacaacacccagtcaaagcccccgttctcgtgatttatgaggtcactaaacggccctcaggagtttctgatcgcttctctggctccaagtctggcaacacggcctccctgactatttctggtctccagtctgaggacgaggctgattattactgcagctcatatacagccagcagcactctcgtcttcgggacagggaccaaggtcaccgtcctcg

SEQ ID NO: 140 - DNA, 325 bp, Artificial Sequence
  Description of Artificial Sequence: Synthetic polynucleotide
gacatccagttgacccagtctccatccttcctgtctgcatctgtaggagacagagtcaccatcacttgccgggccagtcagggcattgacagttttttagcctggtatcagcaaaaaccagggagtgcccctaatctcctcatctatggtgcatccactttgcaaggtggggtcccatcaaggttcagtggcagtggatctgggacagagttcactctcacaatcagcagcctgcagcctgacgattttgcaatttattactgtcaacagctttatagttaccccacgatcaccttcggccaagggacacgactggagattagac

SEQ ID NO: 141 - DNA, 325 bp, Artificial Sequence
  Description of Artificial Sequence: Synthetic polynucleotide
tcctatgagctgacacagccaccctcggtgtcagtgtccccaggacaaacggccaggatcacctgctctggagatgcattgccaaaaaaatatgcttattggtaccagcagaagtcaggccaggcccctgtgctggtcatctatgaggacagcaaacgaccctccgggatccctgagagattctctggctccagctcagggacaatggccaccttgactatcagtggggcccaggtggaggatgaagctgactactactgttactcaacagacagcagtggtaatcattgggtgttcggcggagggaccaagctgaccgtcctag

SEQ ID NO: 142 - DNA, 328 bp, Artificial Sequence
  Description of Artificial Sequence: Synthetic polynucleotide
gaaattgtgttgacgcagtctccaggcaccctgtctttgtctccaggggaaagagccaccctctcctgcagggtcagtcagagtgttagtggcgccttcttaggctggtaccaacagaggcctggccaggctcccaggctcctcatctatggtgcatccagacgggccaccggcgtcccagacaggttcagtggcagtgggtctgggacagacttcactctcaccatcaccagactggagcctgaagattttgcagtttattactgtcagcagtatggtagggcgcccccaatcactttcggccctgggaccaaggtggacatcaaac

SEQ ID NO: 143 - DNA, 325 bp, Artificial Sequence
  Description of Artificial Sequence: Synthetic polynucleotide
gaaattgtgttgacgcagtctccaggcaccctgtctttgtctccaggggaaagagccaccctctcctgcagggccagtcagagtgttagcagcagctacttagcctggtaccagcagaaacctggccaggctcccaggctcctcatctatggtgcatccagcagggccactggcatcccagacaggttcagtggcagtgggtctgggacagacttcactctcaccatcagcagactggagcctgaagattttgcagtgtattactgtcagcagtatggtagctccccgtacacttttggccaggggaccaagctggagatcaaac

SEQ ID NO: 144 - DNA, 331 bp, Artificial Sequence
  Description of Artificial Sequence: Synthetic polynucleotide
cagtctgccctgactcagcctgcctccgtctctgggtctcctggacagtcgatcaccatctcctgcacgggaaccagcagtgacattgctgcttataactatgtctcctggtaccaacaacacccaggcgaagtccccaaacttctcgtttatgatgtcagtaatcggccctcaggggtttctgatcgcttcgctggctccaggtctggcaacacggcctacctgaccatctctggactccaggctgaggacgacgctgattattactgcagctcatatacaagcagcggtggtctcgtcttcggaggtgggaccaaggccaccgtcctag

SEQ ID NO: 145 - DNA, 337 bp, Artificial Sequence
  Description of Artificial Sequence: Synthetic polynucleotide
gatattgtgatgactcagtctccactctccctgcccgtcacccctggagagccggcctccatctcctgcaggtctagtcagagcctcctgcatagtaatggatacaactatttggattggtacctgcagaagccagggcagtctccacagctcctgatctatttgggttctaatcgggcctccggggtccctgacaggttcagtggcagtggatcaggcacagattttacactgaaaatcagcagagtggaggctgaggatgttggggtttattactgcatgcaagctctacaaaccccctacacctttggccaggggaccaagctggagatcaaac

SEQ ID NO: 146 - DNA, 331 bp, Artificial Sequence
  Description of Artificial Sequence: Synthetic polynucleotide
cagtctgccctgactcagcctccctccgcgtccgggtctcctggacagtcagtcaccatctcctgcactggaaccagcaatgacgttggtggttataactttgtctcctggtaccaacagcatccaggcaaagcccccaaactcatgatttatgaggtctctaagcggccctcaggggtccctgatcgcttctctggctccaagtctggcaacacggcctccctgaccgtctctgggctccaggctgaggatgaggcttcttattattgcatctcatatgcagacatcaaccatgtggttttcggcggagggaccaaactgaccgtcctag

SEQ ID NO: 147 - DNA, 340 bp, Artificial Sequence
  Description of Artificial Sequence: Synthetic polynucleotide
gacatcgtgatgacccagtctccagactccctaactgtgtctctgggcgagagggccaccatcaactgcaagtccaggcagagtgttttaaacagctccaacaataagaactggttagtttggtaccagcagaaaccaggacagcctcctaaagcgctcatttcctgggcatctacccgggaatccggggtccctgaccgattcagtggcagcgggtctgggacagaattcactctcaccatcagcagcctgcaggctgaagatgtggcaatttattactgtcagcaatattatagtactccgtggacgttcggccaagggaccaaggtggaaatcaaac

SEQ ID NO: 148 - DNA, 325 bp, Artificial Sequence
  Description of Artificial Sequence: Synthetic polynucleotide
gaaattgtgttgacgcagtctccaggcaccctgtctttgtctccaggggaaagagccaccctcttctgcagggtcagtcagagtattagcagcagccagttagcctggtaccagcggaaacctggccaggctcccagactcatcatctatgatgcatccagcagggccagtggcatcccagacaggttcagtggcagtgagtctgggacagacttcactctcaccatcaacagactggagcctgaagatcttgcagtgtattactgtcagcagtatggtagtgcaccgtacacttttggccaggggaccaagctggagatcaaac

SEQ ID NO: 149 - DNA, 334 bp, Artificial Sequence
  Description of Artificial Sequence: Synthetic polynucleotide
gatattgtgatgacccagactccactctctctgtccgtcacccctggacagccggcctccatctcctgcaagtctagtcagagcctcctgcatagtgatggaaagacctatttgtattggtacctgcagaagccaggccagcctccacagctcctgatctatgaagtttccaaccggttctctggagtgccagataggttcagtggcagcgggtcagggacagatttcacactgaaaatcagccgggtggaggctgaggatgttggggtttattactgcatgcaaagtatacagccgctcactttcggcggagggaccaaggtggagatcaaac

SEQ ID NO: 150 - DNA, 378 bp, Artificial Sequence
  Description of Artificial Sequence: Synthetic polynucleotide
caggttcagctggtgcagtctggagctgaggtgaagaagcctggggccttactgagggtctcctgcaagggctccggtgacacctctactaaccatgccatcgcctgggtgcgacaggcccctggacaagggcttgagtggatgggatggatcaacgtttacaatggtcgaacaaactatgcacagaagttccagggcagagttaccttgaccacagacacagccacgagcacagcctatatggaactgagcagcctgcgatccgacgacacggccgtgtattattgtgcgagatggattcatcgggattttgactggttaccatatggcatgtttatggacgtctggggccaagggaccacggtcaccgtctcctca

SEQ ID NO: 151 - DNA, 378 bp, Artificial Sequence
  Description of Artificial Sequence: Synthetic polynucleotide
caggttcagctggtgcagtctggaggtgaggtgaagaagcctggggccttactgagggtctcgtgcaaggcctccggtgacacctctactaaccatgccatcagctgggtgcgacaagcccctggacaagggcttgagtggatggcatggatcaacgtttacaatggtcgaacaaactatgcaccgcacctccagggcagagtcaccttgaccacagacacagccacgagcacagcctatatgcaactgagtagcctgagatccgacgacacggccgtttattattgtgcgagatggattcatcgggattttgactggttaccatatggcatgtttatggacgtctggggccaagggaccacggtcaccgtctcctca

SEQ ID NO: 152 - DNA, 361 bp, Artificial Sequence
  Description of Artificial Sequence: Synthetic polynucleotide
cagctgcagctgcaggagtcgggcccaggactggtgaagccttcggagaccctgtccctcacctgcactgtctctggtggctccatcagcagtagtggttactactggggctggatccgccagcccccagggaaggggctggagtggattgggactatctattatggtgggagcacctactacagcccgtccctcaagagtcgagtcaccatatccgtagacacgtccaagaaccagttctccctgaaactgagctctgtgaccgccgcagacacggctgtgtattactgtgcgagccaacagtggctacgagggaactttgactactggggccagggaaccctggtcaccgtctcctcag

SEQ ID NO: 153 - DNA, 393 bp, Artificial Sequence
  Description of Artificial Sequence: Synthetic polynucleotide
caggtgcagctggtgcagtctggggctgaggtgaagaagcctggggcctcagtgaaggtttcctgcaaggcatctggatacaccttcaccagctactatatgcactgggtgcgacaggcccctggacaagggcttgagtggatgggaataatcaaccctagtggtggtagcacaagctacgcacagaagttccagggcagagtcaccatgaccagggacacgtccacgagcacagtctacatggagctgagcagcctgagatctgaggacacggccgtgtattactgtgcgagagacacgtccaacgcagaggatttttggagtgcacctatcctgggttactactacggtatggacgtctggggccaagggaccacggtcaccgtctcctca

SEQ ID NO: 154 - DNA, 378 bp, Artificial Sequence
  Description of Artificial Sequence: Synthetic polynucleotide
caggtgcagctggtggagtctgggggaggcgtggtccagcctgggaggtccctgagactctcctgtgcagcctctggattcaccttcagtaactatggcatgcactgggtccgccaggctccaggcaaggggctggagtgggtgacagttatatcatatgatggaagtaataaatactatgcagactccgtgaagggccgattcaccatctccagagacaattccaagaacacgctgtatctgcaaatgaacagcctgagagctgaggacacggctgtatattactgtgcgaaagttctaacttggtcaatacaccccgaagactactactacggtatggacgtctggggccaagggaccacggtcaccgtctcctca

SEQ ID NO: 155 - DNA, 391 bp, Artificial Sequence
  Description of Artificial Sequence: Synthetic polynucleotide
caggtgcagctggtgcagtctggggctgaggtgaagaagcctggggcctcagtgaaggtttcctgcaaggcatctggatacaccttcaccagctactatatgcactgggtgcgacaggcccctggacaagggcttgagtggatgggaataatcacccctagtggtggtagcacaagctacgcacagaagttccagggcagagtcaccatgaccagggacacgtccacgagcacagtctacatggagctgagcagcctgagatctgaggacacggccctgtattactgtgcgagagagagagtgggggtcggtatatatagcagatcgtccgagtcagactttccaactttcgacccctggggccagggaaccctggtcaccgtctcctcag

SEQ ID NO: 156 - DNA, 377 bp, Artificial Sequence
  Description of Artificial Sequence: Synthetic polynucleotide
gaggtgcagctggtggagtctgggggaggcttggtacagcctggggggtccctgagactctcctgtgcagcctctggattcatcttcagtagctacgacatgcactgggtccgccaaggtacacgaaaaggtctggagtgggtctcagctattggtactgctggtgacacatactatccaggctccgtgaagggccgattcaccatctccagagaaaatgccaagaactccttgtatcttcaaatgaacagcctgagagccgaggacacggccgtgtattactgtgcaagagatgattccatggtatgcggataaagatattgcactaacgtggaatagacgtctggggccaagggaccacggtcaccgtctcctca

SEQ ID NO: 157 - DNA, 376 bp, Artificial Sequence
  Description of Artificial Sequence: Synthetic polynucleotide
caggtgcagctggtgcagtctggggctgaggtgaagaagcctgggtcctcggtgaaggtctcctgcaaggcttctggaggcaccttcagcagatatggtatcagctgggtgcgacaggcccctggacaagggcttgagtggatgggaaggatcatccctatgtttggtatagcaaactacgcacagaagttccagggcagagtcacgattaccgcggacaaatccacgagcacagcctacatggagctgagcagcctgagatctgaggacacggccgtctattactgtgcgaccaaaccttattactatgatagtagtggttattacgggggctttgactactggggccagggaaccctggtcaccgtctcctcag

SEQ ID NO: 158 - DNA, 370 bp, Artificial Sequence
  Description of Artificial Sequence: Synthetic polynucleotide
caggtgcagctggtggagtctgggggaggcgtggtccagcctgggaagtccctgagactctcctgtgcagcgtctggattcaccttcagtagctatgccatgcactgggtccgccaggctccaggcaaggggctggagtgggtggcagttatatggtatgatggaagtaataaatattatgcagactccgtgaagggccgattcaccatctccagagacaattccaagaacacgctgtatctgcaaatgaacaggctgagagccgaggacacggctgtgtattactgtgcgagaggggacggcggcggttattggagtggttacggggaggtgaaatggggccagggaaccctggtcaccgtctcctcag

SEQ ID NO: 159 - DNA, 364 bp, Artificial Sequence
  Description of Artificial Sequence: Synthetic polynucleotide
caggtgcagctggtggagtctgggggaggcgtggtccagcctgggaggtccctgagactctcctgtgcagcctctgggttcaccttcactaacaatgctatgcactgggtccgccaggctccaggcaaggggctggagtgggtggcagttatatcatatgatggaagcaatagatactacgcagactccgtgaagggccgattcaccatctccagagacaattccaagaacacgctgtatctgcaaatgaacagcctgagagctgaggacacggctgtgtattactgtgcgagagaagattactatgatagtagtggttcctttgaccactggggccagggaatcctggtcaccgtctcctcag

SEQ ID NO: 160 - DNA, 375 bp, Artificial Sequence
  Description of Artificial Sequence: Synthetic polynucleotide
caggtgcagctggtggagtctgggggaggcgtggtccagcctgggaggtccctgagactctcctgtgcagcgtctgggttcagcttcagtcgctatggcatggactgggtccgccaggctccaggcaaggggctggagtgggtggcaattatatggtatgatggaagtaataatcactatgcagactccgtgaagggccgattcaccatctccagagacaattccaagaacacgctgtttctgcaaatgaacagcctgagagccgaggacacggctgtctattactgtgcgagatcatttaacgaggggcagctcggagacgcctaccacggcatggacgtctggggccaagggaccacggtcaccgtctcctca

SEQ ID NO: 161 - DNA, 376 bp, Artificial Sequence
  Description of Artificial Sequence: Synthetic polynucleotide
gaggtgcagctggtggagtctgggggaggcttggtccagcctggggggtccctgagactctcctgtgcagcctctggagtcacctttagtagctattggatgagttgggtccgccaggctccaggaaaagggctggagtgggtggccaacataagacaagatggaagtgagaaatactctgtggactctgtgaagggccgattcaccatctccagagacaacgccaagaactcactgtatctgcaaatgaacagcctgagagccgaggacacggctgtgtattactgtgcgagggctcgaagggctgataatagtggttattacgggtttcactttgactgctggggccagggaaccctggtcaccgtctcctcag

SEQ ID NO: 162 - DNA, 372 bp, Artificial Sequence
  Description of Artificial Sequence: Synthetic polynucleotide
gaggtgcagctggtggagtctgggggaggcttggtaaagcctggggggtcccttagactctcctgtgcagcctctggtttcactctcagtaatgcctggatgaactgggtccgccaggctccagggaaggggctgcagtgggtcggccgtattaacagcgaaactgatggtgggacaacagactacgctgcacccgtgaaaggcagattcaccatctcaagagatgattcaaaaaacacgctgtatctgcaaatgaacagcctgaaaaccgaggacacagccgtgtattactgtaccacgtcagactaccttcgatactactactacggtatcgacgtctggggccaagggaccacggtcaccgtctcctca

SEQ ID NO: 163 - DNA, 358 bp, Artificial Sequence
  Description of Artificial Sequence: Synthetic polynucleotide
gaggtccagctggtacagtctggggctgaggtgaagaagcctggggctacagtgaaaatctcctgcaaggtttctggatacaccttcaccgactcctacatacactgggtgcagcaggcccctggaaaagggcttgagtggatgggacttcttgatcctgaagatggtgagacaatcaacgcggcgaagttccagggcagagtcaccataaccgcggacacgtctacagacacagcctacatggagctgaggagcctgagatctgaggacacggccgtgtattactgtggatcgggcagtgaggcccactacggtattgactactggggccagggaaccctggtcaccgtctcctcag

SEQ ID NO: 164 - DNA, 623 bp, Artificial Sequence
  Description of Artificial Sequence: Synthetic polynucleotide
gaggtgcagctggtggagtctgggggaggcttggtacagcctggggggtccctgagaccctcctgtgcagcctctggattcgccttcagtagctatgttctgcactgggttcgccgggctccagggaagggtccggagtgggtatcagctattggtactggtggtgatacatactatgcagactccgtgatgggccgattcaccatctccagagacaacgccaagaagtccttgtatcttcaaatgaacagcctgatagctgaggacatggctgtgtattattgtgcaagagacacagtgaggggaagtcaatgtgagcccagatacaaacttccctgcaggaacgctggaggaaatcagctgcagggggcgctcaggagccactgatcagagtcagcccaagaggcaggtgcacacagaggctgatttcctgtcagggtgtgggacttcgtctttttaccatttctctagggaacctctctaagttcagaattctgtgcttaccaatgtcatctctacatgttttttaatgattattttgagaacctattcttacatgcacaaaatgcagatggatgcttacagagatgaaaagtcctcaaccatggtcaccaggatcagcc

SEQ ID NO: 165 - DNA, 367 bp, Artificial Sequence
  Description of Artificial Sequence: Synthetic polynucleotide
caggtgcagctggtggagtctgggggaggcgtggtccagcctgggaggtccctgagactctcctgtgcagcgtctggattcaccttcagtagctatggcatgcactgggtccgccaggctccaggcaaggggctggagtgggtggcagttatatgggatgatggaagtaatagatactatgcagactccgtgaagggccgattcaccatctccagagacaattccaagaacacactatatctgcaaatgaacagcctgagagccgaggacacggctgtgtattactgtgcgagagcgactcctcataggcgtgaccaaggcccatttcactactggggccagggaaccctggtcaccgtctcctcag

SEQ ID NO: 166 - DNA, 346 bp, Artificial Sequence
  Description of Artificial Sequence: Synthetic polynucleotide
gaggtgcagctggtggagtctgggggagacttggtacagcctggggggtccctgagactctcctgtgcagcctctggattcacctttagcagctatgccatgagctgggtccgccaggctccagggaaggggctggagtgggtctcaactattagtactactggtggtgacacatactacgcagactccgtgaagggccggttcaccatctccagagacaattccaagaataagctgaatctgcagatgaacagcctgagagccgaggacacggccgtatattcctgtgcgagacataatgagcttgactactggggccagggaaccctggtcaccgtctcctcag

SEQ ID NO: 167 - DNA, 364 bp, Artificial Sequence
  Description of Artificial Sequence: Synthetic polynucleotide
caggtgcagctggtggagtctgggggaggcgtggtccagcctgggaggtccctgagactctcctgtgcagcctctggattcaccttcagtagctatgctatgcactgggtccgccaggctccaggcaaggggctggagtgggtggcagttatatcatatgatggaagcaataaatactacgcagactccgtgaagggccgattcaccatctccagagacaattccaagaacacgctgtatctgcaaatgaacagcctgagagctgaggacacggctgtgtattactgtgcgagagaggattactatgatagtagtggttcacttgactactggggccagggaaccctggtcaccgtctcctcag

SEQ ID NO: 168 - DNA, 370 bp, Artificial Sequence
  Description of Artificial Sequence: Synthetic polynucleotide
caggtgcagctggtggagtctgggggaggcgtggtccagcctgggaggtccctgagactctcctgtgcagcctctggattcaccttcagtcactatggcatgcactgggtccgccaggctccaggcaagggactggagtgggtggcacttatatcatatgatggaaataataaatactatgcagactccgtgaagggccgattcaccatctccagagacaattccaagaacacgctgtatctgcaaatgaacagcctcagagctgaggacacggctgtgtattactgtgcgaaagctccatacagctatgcttattcggtttacttctttgactactggggccagggaaccctggtcaccgtctcctcag

SEQ ID NO: 169 - DNA, 352 bp, Artificial Sequence
  Description of Artificial Sequence: Synthetic polynucleotide
gaggtgcagctggtggagtctggaggaggcctgatccagcctggggggtccctgagactctcctgtgcagcttctgggttcatcgtcagttacaactacatgagctgggtccgccaggctccagggaaggggctggagtgggtctcagttatttatagcggtggtagcacattctacgcagactccgtgaagggccgattcaccatctccagagacaattccaagaacacgctgtatcttcaaatgaacagcctgagagccgaggacacggccgtgtattactgtgcgagagactacggtgactactactttgactactggggccagggaaccctggtcaccgtctcctcag

SEQ ID NO: 170 - DNA, 370 bp, Artificial Sequence
  Description of Artificial Sequence: Synthetic polynucleotide
caggtccagctggtgcagtctggggctgaggtgaagaagcctgggtcctcggtgaaggtctcctgcaaggcttctggaggcaccttcagtaggtatgctatcaactgggtgcgacaggcccctggacaagggcttgagtggatgggaaggatcatccctatctttggtatagcaaactacgcacagaaattccagggcaaagtcacgattaccgcggacaaatccacgagcacagcctacatggagctgagcagcctgagatctgaggacacggccgtgtattactgtgcgagagcggattattactatgatagtagtggttatttctttgactactggggccagggaaccctggtcaccgtctcctcag

SEQ ID NO: 171 - DNA, 361 bp, Artificial Sequence
  Description of Artificial Sequence: Synthetic polynucleotide
caggtgcagctggtggagtctgggggaggcgtggtccagcctgggaggtccctgagactctcctgtgcagcctctggattcaccttcagtacctatggcatgcactgggtccgccaggctccaggcaaggggctggagtgggtggcagttatatcatatgatggaagtaataaatactatgcagactccgtgaagggccgattcaccatctccagagacaattccaagaacacgctgtatctgcaaatgaacagcctgagagctgaggacacggctgtgtattactgtgcgaaatcggattcggagctgctacctcattttgactactggggccagggaaccctggtcaccgtctcttcag

SEQ ID NO: 172 - DNA, 378 bp, Artificial Sequence
  Description of Artificial Sequence: Synthetic polynucleotide
caggttcagctggtgcagtctggagctgaggtgaagaagcctggggccttactgagggtctcctgtaaggcctccggtgacacctctactaaccatggcatcacctgggtgcgacaggcccctggacaagggcttgagtggatgggatggatcaccgtttataatggtagaacaaactatgcacagaaggtccagggcagagtcaccatgaccacagacacatccacgagcacagcctatatggagctgaggagcctgagatctgacgacacggccgtgtattattgtgcgagatggattcatcgggattttgactggttaccatatggcatgtttatggacgtctggggccaagggaccacggtcaccgtctcctca

SEQ ID NO: 173 - DNA, 370 bp, Artificial Sequence
  Description of Artificial Sequence: Synthetic polynucleotide
caggtgcagctgcaggagtcgggcccaggactggtgaagccttcacagaccctgtccctcacctgcactgtctctggtggctccatcagcagtaatggttactactggagctggatccgccagcacccagggaagggcctggagtggattgggtacatctattacagtgggagcacctactacaacccgtccctcaagagtcgagtttccatatcagttgacacgtctaagaaccagttctccctgaagctgagctctgtgactgccgcggacacggccgtgtattactgtgcgagatcttacctaagtggctacgaaggccactcctttgactactggggccagggaaccctggtctccgtctcctcag

SEQ ID NO: 174 - DNA, 384 bp, Artificial Sequence
  Description of Artificial Sequence: Synthetic polynucleotide
gaggtgcagctggtggagtctgggggagccttggtacagccgggggggtccctgagactgtcctgtgtagtctcgggattcagcctcatgaagtacgacatgcactgggtccgccaagtcacaggaagaggtctcgagtgggtctcaggcatcactgttactggagacacaaattacgtaggatccgtgaagggccgattcaccgtctccagagagaatgccaaggacttgttgtatcttcaaatgaacagcctgagagtcgacgacacggccgtgtattactgtgcaagatcccggtattacgatttttggagtggttattattccgtagatgactatggtatggacgtctggggccaagggaccacggtcaccgtctcctca

SEQ ID NO: 175 - DNA, 369 bp, Artificial Sequence
  Description of Artificial Sequence: Synthetic polynucleotide
caggtccagctggtgcagtctggggctgaggtgaagaagcctgggtcctcggtgaaggtctcctgcaaggcttctggaggcaccttcagcagctatgctatcagctgggtgcgacaggcccctggacaagggcttgagtggatgggaaggatcatccctatgtttggtatagcaaattacgcacagaagttccagggcagagtcacgattaccgcggacaaatccacgagcacagcctacttggagctgagcagcctgagatctgaggacacggccgtgtactactgtgcgagatatatggtgacacgggaccagtactactacgatatggacgtctggggccaagggaccacggtcaccgtctcgtca

SEQ ID NO: 176 - DNA, 364 bp, Artificial Sequence
  Description of Artificial Sequence: Synthetic polynucleotide
caggtgcagctggtggagtctgggggaggcgtggtccagcctgggaggtccctgagactctcctgtgcagcctctggattcaccttcagtagttatgctatgcactgggtccgccaggctccagacaaggggctggagtgggtggcagttatatcatatgatggaagcaataaatactacgcagactccgtgaagggccgattcaccatctccagagacaactccaagaacacgctgtatctgcaattgaacagcctgagaactgaggacacggctgtgtattactgtgcgagagaggattactatgatagtagtggttcccttgactactggggccagggaaccctggtcaccgtctcctcag

SEQ ID NO: 177 - DNA, 379 bp, Artificial Sequence
  Description of Artificial Sequence: Synthetic polynucleotide
gaggtgcagctggtggagtctgggggaggcttggtccagcctggggggtccctgagactctcctgtgcagcctctgggttcacctttagtaggtattggatgagctgggtccgccaggctccagggaaagggctggagtgggtggccaacataaagcaagatggaagtgagaaagactatgtggactctgtgaagggccgattcaccatctccagagacaacgccaagaactcactgtatctgcaaatgaacagcctgagagccgaggacacggctgtgtattactgtgcgagggctacgtattactatgatagtagtgattatggaatcaactggttcgacccctggggccagggaaccctggtcaccgtctcctcag

SEQ ID NO: 178 - DNA, 346 bp, Artificial Sequence
  Description of Artificial Sequence: Synthetic polynucleotide
gaggtgcagctggtggagtctgggggagacttggtacagcctggggggtccctcagactctcctgtgcagcctctggattcacgttcagcacctatgccatgacctgggtccgccaggctccagggaaggggctggagtgggtctcaactattagtaccactggtggtgacacatattatgcagactccgtgaagggccggttcaccatctccagagacaattccaagaacacactgaatctgcacatgaacagcctgagagccgaggacacggccgtatattcctgtgcgagacataatgagcttgactactggggccagggaaccctggtcaccgtctcctcag

SEQ ID NO: 179 - DNA, 376 bp, Artificial Sequence
  Description of Artificial Sequence: Synthetic polynucleotide
gaggtgcagctggtggagtctgggggaggcttggtccagcctggggggtccctgagactctcctgtgcagcctctggattcacctttagtaactattggttgagctgggtccgccaggctccagggaaagggctggagtgggtggccaacataaaccaagatggaagtgagaaatactatgtggactctgtgaagggccgattcaccatctccagagacaacaccaagaactcactgtatctgcaaatgaacagcctgagagccgaggacacggctgtgtattactgtgcgagggctcgaagggctggcagtagtggttattacgggtttcactttgactactggggccagggaaccctggtcaccgtctcctcag

SEQ ID NO: 180 - DNA, 373 bp, Artificial Sequence
  Description of Artificial Sequence: Synthetic polynucleotide
caggtgcagctggtggagtctgggggaggcgtggtccagcctgggaggtccctgagactctcctgtgcagcctctggattcaccttcagtagctatggcatgcactgggtccgccaggctccaggcaaggggctggagtgggtggcagttatatcatatgatggaagtaataaatactatacagactccgtgaagggccgattcaccatctccagagacaattccaagaacacgctgtttctgcaaatgaacagcctgagagctgaggacacggctgtgtattactgtgcgaaacaagggggggggccgtattactttggttcagggtactttgactactggggccagggaaccctggtcaccgtctcctcag

SEQ ID NO: 181 - DNA, 370 bp, Artificial Sequence
  Description of Artificial Sequence: Synthetic polynucleotide
caggtgcagctggtgcagtctggggctgaggtgaagaagcctgggtcctcggtgaaggtctcctgcaaggcttctggaggcaccttcagcaactatgctatcaactgggtgcgacaggcccctggacaagggcttgagtggatgggaaggatcatccctatctttggtatagcaaactacgcacaggagttccagggcagagtcacgattaccgcggacaaatccacgagcacagtctacatggaactgagcagcctgagatctgaggacacggccgtgtattactgtgcgagagcaaattattactatgaaagtagtggttattactttgactactggggccagggaaccctggtcaccgtctcctcag

SEQ ID NO: 182 - DNA, 355 bp, Artificial Sequence
  Description of Artificial Sequence: Synthetic polynucleotide
caggtgcagctgcaggagtcgggcccaggactggtgaagccttcggggaccctgtccctcacctgcgctgtctctggtggctccatcagcagtcctaactggtggagttgggtccgccagcccccagagaaggggttggagtggattggggaaatctttcatattgggagcaccaactacaacccgtccctcaagagtcgagtcaccatatcactagacaagtccaagaaccaattctccctgaggctgagctctgtgaccgccgcggacacggccgtatattactgtgcgagaggatttacgaattggtacttcgatctctggggccgtggcaccctggtcactgtctcctcag

SEQ ID NO: 183 - DNA, 387 bp, Artificial Sequence
  Description of Artificial Sequence: Synthetic polynucleotide
caggtgcagctggtggagtctgggggaggcgtggtccagcctgggaggtccctgagactctcctgtgcagcctctggattcacgttcagtagctatggcatgcactgggtccgccaggctccaggcaaggggctggagtgggtggcagttatatcatttgatggaagtaataaatactatgtagactccgtgaagggccgattcaccatctccagagacaattccaagaacacgctgtatctgcaaatgaacagcctgagagctgaggacacggctgtgtattactgtgcgaaagatatgcacaacgactacggtgactacgtgtcttactacttctactacggtatggacgtctggggccaagggaccacggtcaccgtctcctca

SEQ ID NO: 184 - DNA, 358 bp, Artificial Sequence
  Description of Artificial Sequence: Synthetic polynucleotide
gaggtgcagctgttggagtctgggggaggcttggtacagcctggagggtccctgagactctcctgtgcagcctctggattcacctttagtagctatgccatgagctgggtccgccaggctccagggaaggggctggagtgggtctcaggtattagtggtagtggtatcacatacaacgcagactccgtgaagggccggttcaccatctccagagacaattccaagaacacgctgtatctgcaaatgaacagcctgagagccgaggacacggccgtatattactgtgcgaagctagcagtggctggtggacgtggtgcaaactactggggccagggaaccctggtcaccgtctcctcag

SEQ ID NO: 185 - DNA, 376 bp, Artificial Sequence
  Description of Artificial Sequence: Synthetic polynucleotide
caggtgcagctgcaggagtcgggcccaggactggtgaagccttcacagaccctgtccctcacctgcactgtctctggtggctccatcaggagtggtggttactactggagctggatccgccagcacccagggaagggcctggagtggattgggaacatctattacagtgggagcacctaccacaacccgtccctcaagagtcgagttaccatatcagtagacacgtctaagaaccagttttccctgaagctgagttctgtgactgccgcggacacggccatatattactgtgcgaggggagggccggagattactatgatagccattgatgcttttgatatctggggccaagggacaatagtcaccgtctcttcag

SEQ ID NO: 186 - DNA, 355 bp, Artificial Sequence
  Description of Artificial Sequence: Synthetic polynucleotide
gaggtgcagctggtggagtctggaggaggcttgatccagcctggggggtccctgagactctcctgtgcagcctctgggttcaccgtcagtagcaactacatgagctgggtccgccaggctccagggaaggggctggagtgggtctcagttatttatagcggtggtagcacattctacgcagactccgtgaagggccgattcaccatctccagagacaattccaagaacacgctgtatcttcaaatgaacagcctgggagccgaggacacggccgtgtattactgtgcgagagatctgggctctaggggggcttttgatatctggggccaagggacaatggtcaccgtctcttcag

SEQ ID NO: 187 - DNA, 379 bp, Artificial Sequence
  Description of Artificial Sequence: Synthetic polynucleotide
caggtgcagctgcaggagtcgggcccaggactagtgaagccttcacagaccctgtccctcacctgcactgtctctggtggctccatcagcagtgctacttactactggagctggatccggcagcccgccgggaagggactggagtggattgggcatatttataccagtgggaccaccaactacaacccctccctcaagagtcgggtcaccatatcagttgacacgtccaagagccagttctccctgaagctgaattctgtgaccgccgcagacacggccgtgtattactgtgcgagaggtctacgattttgtagtgacaccaggtgctacccgtactttgactactggggccagggaaccctggtcaccgtctcctcag

SEQ ID NO: 188 - DNA, 369 bp, Artificial Sequence
  Description of Artificial Sequence: Synthetic polynucleotide
caggtgcagctggtgcagtctggggctgaggtgaagaagcctggggcctcagtgaaggtttcctgcaaggcttctggatacacgttcaccggctactatatgcactgggtgcgacaggcccctggacaagggcttgagtggatgggatggatcaaccctaacagtggtgccacaaactatgcacagaagtttcagggctgggtcaccatgaccagggacacgtccatcaacacagcctacatggagttgaggagactgaaatctgacgacacggccgtgttttactgtgcgagagaaacatccttcgcgatttttggaggggggggtatggacgtctggggccaagggaccacggtcaccgtctcctca

SEQ ID NO: 189 - DNA, 360 bp, Artificial Sequence
  Description of Artificial Sequence: Synthetic polynucleotide
gaggtgcagctggtggagtctgggggaggcttggtccagccgggggggtccctgagactctcctgtgcagcctctggattcaccgtcagtagcagctacatgagctgggtccgccaggctccagggaaggggctggagtgggtctcagttatttatagcggtggtagcacatactacgcagactccgtgaagggccgattcaccatctccagagacaattccaagaacacgctgtatcttcaaatgaacagcctgagagctgaggacacggctgtgtattactgtgcgagagatccgtcctcccggggatactacggtatggacgtctggggccaagggaccacggtcaccgtctcctca

SEQ ID NO: 190 - DNA, 384 bp, Artificial Sequence
  Description of Artificial Sequence: Synthetic polynucleotide
gaagtgcagctggtggagtctgggggaggcttggtacagcctggcaggtccctgagactctcctgtgcagcctctggattcacctttgatgattatgccatgcactgggtccggcaagctccagggaagggcctggagtgggtctcaggtattacttggaatagtggtatcataggctatgcggactctgtgaagggccgattcaccatctccagagacaacgccaagaactccctgtatctgcaaatgaacagtctgagagctgaagacacggccttgtattactgtgcaaaagatattctctccagggtgcattactatgatagtagtggttcttacggtatggacgtctggggccaagggaccacggtcaccgtctcctca

SEQ ID NO: 191 - DNA, 367 bp, Artificial Sequence
  Description of Artificial Sequence: Synthetic polynucleotide
gaggtgcagctggtggagtctgggggaggcttggtacagcctggggggtccctgagactctcctgtgcagcctctggattcaccttcagtagctacgacatgcactgggtccgccaagttacaggaaaaggtctggagtgggtctcacttattggtactgctggtgacacatactatccaggctccgtgaagggccgattcaccatctccagagaaaatgccaagaactccttgtatcttcaaatgaacagcctgagagccggggacacggctgtgtattactgtgcaagagtgggatacacctatggtttccgctactggtacttcgatctctggggccgtggcaccctggtcactgtctcctcag

SEQ ID NO: 192 - DNA, 352 bp, Artificial Sequence
  Description of Artificial Sequence: Synthetic polynucleotide
gaggtgcagctggtggagtctggaggaggcttgatccagcctggggggtccctgagactctcctgtgcagcctctgggttcatcgtaagtagtaactacatgagctgggtccgccaggctccagggaaggggctggagtgggtctcacttatttatagcggtggtagcacattctacgcagactccgtgaagggccgattcaccatctccagagacaattccaagaacacgctgtatcttcaaatgaacagcctgagagccgaggacacggccgtgtattactgtgcgagagacctacagcagctcgggattgactactggggccagggaaccctggtcaccgtctcctcag

SEQ ID NO: 193 - DNA, 400 bp, Artificial Sequence
  Description of Artificial Sequence: Synthetic polynucleotide
caggtgcagctgcaggagtcgggcccaggactggtgaagccttcacagaccctgtccctcacctgcactgtctctggtggctccatcagcagtggtagttactactggagctggatccggcagcccgccgggaagggactggagtggattgggcgtatctattccagtgggagcaccaactacaacccctccctcaagagtcgagtcaccatatcaatagacacgtccaagaaccagttgtccctgaagctgagctctgtgaccgccgcagacacggccgtgtattactgtgcgagggctgatcgtgaacgagtcccgtatttcggttacgatttttggagtggttatcccgatgcttttgatatctggggccaagggacaatgctcaccgtctcttcag

SEQ ID NO: 194 - DNA, 410 bp, Artificial Sequence
  Description of Artificial Sequence: Synthetic polynucleotide
gaggtgcagctggtggagtctgggggaggcttgctaaagcctggggggtcccttagactctcctgtgcagcctctggtttcactttcagtaacgcctggatgaactgggtccgccaggctccagggaaggggctggagtgggtcggccgtattaaaagcaaaactgatggtgggacaacagactacgctgcacccgtgaaaggcagattcaccatctcaagagatgattcaaaaaacacgctgtatctgcaaatgaacagcctgaaaaccgaggacacagtcgtgtattagtgtaccacaggttattgtaggagtaccagctgcctgaaaataagcaacgatattatgactggttatcccaggcctttgagactactggggccagggaaccctggtcaccgtctcctcag

SEQ ID NO: 195 - DNA, 367 bp, Artificial Sequence
  Description of Artificial Sequence: Synthetic polynucleotide
caggtgcagctggtgcagtctggggctgaggtgaagaagcctgggtcctcggtgaaggtctcctgcaaggcttctggaggcaccttcaggagctatgctatcagctgggtgcgacaggcccctggacaaggacttgagtggatgggaaggatcatccctatgtttggtatagcaaactacgcacagaagttccaggacagagtcacgattaccgcggacaaatccacgagcacagcctacatggagctgagcagcctgagatctgaggacacggccgtgtattactgtgcggaaaacctacaggatgattcagggaccctatattcggggggctggggccagggaaccctggtcaccgtctcctcag

SEQ ID NO: 196 - DNA, 381 bp, Artificial Sequence
  Description of Artificial Sequence: Synthetic polynucleotide
caggtgcagctggtgcagtctggggctgaggtgaagaagcctggggcctcagtgaaggtctcctgcaaggcttctggatacaccttcaccgactactatatgcactgggtgcgacaggcccctggacaagggcttgagtggatgggacggatcaaccctagcagtggtggcacaaactatgtacagaagtttcagggcagggtcaccatgaccagggacacgtccatcagtacatcctacatggagctgagcaggctgagatctgacgacacggccgtgtattactgtgcgagagatcttgaggatttttggagtggttaccctcctcttggctacgctttggacgtctggggccaagggaccacggtcaccgtctcctca

SEQ ID NO: 197 - DNA, 367 bp, Artificial Sequence
  Description of Artificial Sequence: Synthetic polynucleotide
caggtgcagctgcaggagtcgggcccaggactggtgaagccttcggagaccctgtccctcacctgcactgtctctggtggctccatcagtagttactactggagctggatccggcagcccccagggaagggactggagtggattgggtatatctattacagtgggagcaccaactacaacccctccctcaagagtcgagtcaccatatcagtagacacgtccaagaaccagttctccctgaagctgagctctgtgaccgctgcggacacggccgtgtattactgtgcgagttattactatgatagtagtggttattactatggttttgatatatggggccaagggacaatggtcaccgtctcttcag

SEQ ID NO: 198 - DNA, 381 bp, Artificial Sequence
  Description of Artificial Sequence: Synthetic polynucleotide
caggtgcagctggtggagtctgggggaggcgtggtccagcctgggaggtccctgagactctcctgtgcagcgtctgaattcaccttcagtagctatgacatgcactgggtccgccaggctccaggcaaggggctggagtgggtggcagttatttggtatgatggaagtagtaaatactaagcagactccgtgaagggccgattcaccatctccagagacaattccaagactacgctgtatctgcaaatgaacagcctgagagccgaggacacggctgtgtattgctgtgcgagagatcgtttttcgcgtattactatgatagtcgtggacgagggtactttgactactggggccagggaaccctggtcaccgtctcctcag

SEQ ID NO: 199 - DNA, 364 bp, Artificial Sequence
  Description of Artificial Sequence: Synthetic polynucleotide
caggtgcagctggtggagtctgggggaggcgtggtccagcctgggaggtccctgagactctcctgtgcagcctctggattcaccttcagtagctatgctatgcactgggtccgccaggctccaggcaaggggctggagtgggtggcagttatatcatatgatggaagcaataaatactacgcagactccgtgaagggccgattcaccatctccagagacaattccaagaacacgctgtatctgcaaatgaacagcctgagagctgaggacacggctgtgtattactgtgcgagaagtgggagtgggaactactaccactggttcgacccctggggccagggaaccctggtcaccgtctcctcag

SEQ ID NO: 200 - DNA, 375 bp, Artificial Sequence
  Description of Artificial Sequence: Synthetic polynucleotide
caggtgcagctgcaggagtcgggcccaggactggtgaagccttcggagaccctgtccctcacctgcactgtctctggtggctccatcagtagttactactggagctggatccggcagcccccagggaagggactggagtggattgggtatatctattacagtgggagcaccaactacaacccctccctcaagagtcgagtcaccatatcagtagacacgtccaagaaccagttctccctgaagctgagctctgtgaccgctgcggacacggccgtgtattactgtgcgagaggacccgagtattacgatttttggagtggttatcccggtggtatggacgtctggggccaagggaccacggtcaccgtctcctca

SEQ ID NO: 201 - DNA, 373 bp, Artificial Sequence
  Description of Artificial Sequence: Synthetic polynucleotide
caggtgcagctggtggagtctgggggaggtgcggccaggcgtgtgaggtcccagtgactgtccagcctagggtctggactcacagtcagtagtcatggcatgcggtgggtccggctgcctccaggcaaggggaaggagtaggtggcagttgtatggtaggaaggaagtaataaacagaatagagaatctgtgaaggagggagacaccatatcccgagacaagaccacgaacgcatcgcatatgcaaaagaacagcgcgagaaaagaggacacgcgggtgtgtaatagtgtgagagatcacgttagtgggagctacggcaccaggtagcactttgactactggggccagggaaccctggtcaccgtctcctcag

SEQ ID NO: 202 - DNA, 367 bp, Artificial Sequence
  Description of Artificial Sequence: Synthetic polynucleotide
caggtgcagctggtggagtctgggggaggcgtggtccagcctgggaggtccctgagactctcctgtgcagcctctggattcaccttcagtagctatggcatgcactgggtccgccaggctccaggcaaggggctggagtgggtggcagttatatcatatgatggaagtaataaatactatgcagactccgtgaagggccgattcaccatctccagagacaattccaagaacacgctgtatctgcaaatgaacagcctgagagctgaggacacggctgtgtattactgtgcgacaaacagacagcctatagcagtggctggtacccttgactactggggccagggaaccctggtcaccgtctcctcag

SEQ ID NO: 203 - DNA, 361 bp, Artificial Sequence
  Description of Artificial Sequence: Synthetic polynucleotide
caggtgcagctgcaggagtcgggcccaggactggtgaagccttcggggaccctgtccctcacctgcgctgtctctggtggctccatcagcagtagtaactggtggagttgggtccgccagcccccagggaaggggctggagtggattggggaaatctatcatagtgggagcaccaactacaacccgtccctcaagagtcgagtcaccatatcagtagacaagtccaagaaccagttctccctgaagctgagctctgtgaccgccgcggacacggccgtgtattactgtgcgagagaaccctcttatagcagtggctgccttgactactggggccagggaaccctggtcaccgtctcctcag

SEQ ID NO: 204 - DNA, 401 bp, Artificial Sequence
  Description of Artificial Sequence: Synthetic polynucleotide
gaggtgcagctggtggagtctgggggaggcttggtccagcctggggggtccctgagactctcctgtgcagcctctggattcacctttagtagctattggatgagctgggtccgccaggctccagggaaggggctggagtgggtggccaacataaagcaagatggaagtgagaaatactatgtggactctgtgaagggccgattcaccatctccagagacaacgccaagaactcactgtatctgcaaatgaacagcctgagagccgaggacacggctgtgtattactgtgcgagagcgggtaaggtgcgctgtagtggtggtagctgctactcatgatctggggctactactactacggtatggacgtctggggccaagggaccacggtcaccgtctcctca

SEQ ID NO: 205 - DNA, 367 bp, Artificial Sequence
  Description of Artificial Sequence: Synthetic polynucleotide
caggtcaccttgaaggagtctggtcctgtgctggtgaaagccacagagaccctcacgctgacctgcaccgtctctgggttctcacacagcaatgttagaatgggtgtgagctggatccgtcagcccccagggaaggccctggagtggcttgcacacatttctccgaatgacgaaaaatcctacagtacatctctgaagagcagactcaccatctccgaggacacttccaaaagccaggtggtccttaccatgaccaacgtggaccctgtggacacagccgcatattactgtgcacggccccttaaccctggtttccccgatgtttttgatatttggggccaagggacaatggtcaccgtctcttcag

SEQ ID NO: 206 - DNA, 370 bp, Artificial Sequence
  Description of Artificial Sequence: Synthetic polynucleotide
caggtgcagctgcaggagtcgggcccaggactggtgaagccttcacagaccctgtctctcacctgcactgtctctggtggctccatcagcaatggtggttactactggagctggatccgccagcacccagggaagggcctggaatggattgggttcatctattacagtgggagcacctactacaacccgtccctcaagagtcgagttaccatatcagtagacacgtctaagaaccagttctccctgaagctgagctctgtgactgccgcggacacggccgtgtattactgtgcgacctccctttatggcagcagctactacggaacttttaatatctggggccaagggacaatggtcaccgtctcttcag

SEQ ID NO: 207 - DNA, 376 bp, Artificial Sequence
  Description of Artificial Sequence: Synthetic polynucleotide
caggtccagctggtgcagtctggggctgaggtgaagaagcctgggtcctcggtgaaggtctcctgcaaggcttctggaggcaccttcagcagatatggtatcagctgggtgcgacaggcccctggacaagggcttgagtggatgggaaggatcatccctatgtttggtatagcaaactacgcacagaagttccagggcagagtcacgattaccgcggacaaatccacgagcacagcctacatggagctgagcagcctgagatctgaggacacggccgtctattactgtgcgaccaaaccttattactatgatagtagtggttattacgggggctttgactactggggccagggaaccctggtcaccgtctcctcag

SEQ ID NO: 208 - DNA, 373 bp, Artificial Sequence
  Description of Artificial Sequence: Synthetic polynucleotide
gaggtgcagctggtggagtctgggggaggcttggtccagcctggggggtccctgaaactctcctgtgcagcctctgggttcaccttcagtggctctgctatgcactgggtccgccaggcttccgggaaagggctggagtgggttggccgtattagaagcaaagctaacagttacgcgacagcatatgctgcgtcggtgaaaggcaggttcaccatctccagagatgattcaaagaacacggcgtatctgcaaatgaacagcctgaaaaccgaggacacggccgtgtattactgtactactgtattacgatttttggagtggttatgggttagggactactggggccagggaaccctggtcaccgtctcctcag

SEQ ID NO: 209 - DNA, 367 bp, Artificial Sequence
  Description of Artificial Sequence: Synthetic polynucleotide
caggtgcagctggtggagtctgggggaggcgtggtccagactgggaggtccctgagactctcctgtgcagcctctggattcacgttcagtagttatgctatgcactgggtccgccaggctccaggcaaggggctggagtcggtggcaattatatcatatgatggaagcagtacatactacgcagaatccgtacaggaccgattcaccatctccagagacaattccaagaacacgctgtatctgcaaatgaacagcctgagaactgaggacacggctatgtattactgtgcgaaagatatggcctttagtgggaccttcccatttcttgaatactggggccagggtaccctggtcaccgtctcgtcag

SEQ ID NO: 210 - DNA, 378 bp, Artificial Sequence
  Description of Artificial Sequence: Synthetic polynucleotide
caggtgcagctacagcagtggggcgcaggactgttgaagccttcggagaccctgtcccgcacatgcgctgtctacggtgcgtccttcagtggttcctactggagctggatccgccagtccccagggaaggggctggagtggattggtgacatcaatcatcgtggaaacaccaattacaacccgtcactcgagagtcgactcaccatgtccgtggacacgtccaagaagcagttctccctggagctgagttctgtgaccgccgcggacacggctgtatattactgtgccagatctaccccgttccgtttgacagcagctggtccagattactacggtcttgacgtctggggccaaggggccacggtcatcgtctcctca

SEQ ID NO: 211 - DNA, 370 bp, Artificial Sequence
  Description of Artificial Sequence: Synthetic polynucleotide
caggtgcagctggtggagtctgggggaggcgtggtccagcctgggaggtccctgagactctcctgtgcagcctctggattcaccttcagtagctatgctatgcactgggtccgccaggctccaggcaaggggctggagtgggtggcagttatatcatatgatggaagcaataaatactacgcagactccgtgaagggccgattcaccatctccagagacaattccaagaacacgctgtatctgcaaatgaacagcctgagagctgaggacacggctgtgtattactgtgcgagcgaacgaagtcgaagtatagcagtggctggtactctggactactggggccagggaaccctggtcaccgtctcctcag

SEQ ID NO: 212 - DNA, 372 bp, Artificial Sequence
  Description of Artificial Sequence: Synthetic polynucleotide
caggtgcagctggtggagtctgggggaggcgtggtccagcctgggaggtcccggagactctcctgtgcagcctctggattcacgttcagaaactctgctatgcactgggtccgccaggctccaggcaaggggctggagtgggtggcggttatttcatatgatggaaaccttaaatactccgcagactccgtgaagggccgattcaccatctccagagacaattccaagaacaccctctttttacaaatgaatagtctgagacttgacgacacggctgtctattactgtgcgagacagggggcacattgtagtggtggtgtttgctacggtatggacgtctggggccaagggaccacggtcaccgtctcctca

SEQ ID NO: 213 - DNA, 372 bp, Artificial Sequence
  Description of Artificial Sequence: Synthetic polynucleotide
caggtgcagctggtggagtctgggggaggcgtggtccagcctgggaggtcccggaaactctcctgtgcagcctctggattcacgttcagaaactctgctatgcactgggtccgccaggctccaggcaaggggctggagtgggtggcggttatttcatatgatggaaaccttaaatactccgcagactccgtgaagggccgattcaccatctccagagacaattccaagaacaccctctttttacaaatgaatagtctgagacttgacgacacggctgtctattactgtgcgagacagggggcacattgtagtggtggtgtctgctacggtatggacgtctggggccaagggaccacggtcaccgtctcatca

SEQ ID NO: 214 - DNA, 366 bp, Artificial Sequence
  Description of Artificial Sequence: Synthetic polynucleotide
caggtcaccttgaaggagtctggtcctgtgctggtgaaacccacagagaccctcacgctgacctgcaccgtctctgggttctcactcagcaatgctagaatgggtgtgagctggatccgtcagcccccagggaaggccctggagtggcttgcacacattttttcgggtgacgaaaaatcctacagcacatctctgacgagcaggctcaccatctccaaggacacctccaaaagtcaggtggtccttaccatgaccaacatggaccctgtggacacagccacatattactgtgcacggatacagctatggttagacgggggtggtatggacgtctggggccaagggaccacggtcaccgtctcctca

SEQ ID NO: 215 - DNA, 367 bp, Artificial Sequence
  Description of Artificial Sequence: Synthetic polynucleotide
caggtccagctggtacagtctggggctgaggtgaagaagcctggggcctcagtgaaggtctcctgcaaggtttccggattcaccctcactgaattatccatgcactgggtgcgacaggctcctggaaaagggcttgagtggatgggaggttttgatcctgaagatgttgaaacaatctacgcacagaatttccagggcagagtcaccgtgaccgaggacacatctacagacacagcctacatggagctgagcagcctgagatctgaggacacggccgtgtattactgtgcaacagggactcttttcacggtgactacgagttggttcgacccctggggccagggaaccctggtcaccgtctcctcag

SEQ ID NO: 216 - DNA, 361 bp, Artificial Sequence
  Description of Artificial Sequence: Synthetic polynucleotide
cagatcaccttgaaggagtctggtcctacgctggtgaaacccacacagaccctcacgctgacctgcaccttctctgggttctcactcagcactagtggagtgggtgtgggctggatccgtcagcccccaggaaaggccctggagtggcttgcactcatttattgggatgatgataagcgctacatcccatctctgaagaccaggctcaccatcaccaaggacacctccaaaaaccaggtggtccttacaatgaccaacatggaccctgtggacacagccacatattactgtgcacacagactccccctttgggggggatttgactactggggccagggaaccctggtcaccgtctcctcag

SEQ ID NO: 217 - DNA, 372 bp, Artificial Sequence
  Description of Artificial Sequence: Synthetic polynucleotide
caggtgcagctggtggagtctgggggaggcgtggtccagcctgggaggtccctgagactctcctgtgcagcctctggattcaccttcagtagctatgccatgcactgggtccgccaggctccaggcaaggggctggagtgggtggcagttatatcatatgatggaagtaataaatactatgcagactccgtgaagggccgattcaccatctccagagacaattccaagaacacgctgtatctgcaaatgaacagcctgagagctgaggacacggctgtgtatttctgtgcgaccgacccggccagcgatagcctttactattattacggtatggacgtctggggccaagggaccacggtcaccgtctcctca

SEQ ID NO: 218 - DNA, 364 bp, Artificial Sequence
  Description of Artificial Sequence: Synthetic polynucleotide
caggtgcagctggtgcagtctggggctgaggtgaagaagactggggcctcagtgaaggtctcctgcaagacttctggatacaccttcaccggcttccatatccactgggtgcgacaggcccctggacaagggcttgagtggatgggacggatcaaccctaacactggtggcacaacctatgcacaggagtttcagggctgggtcaccatgaccagggactcgtccatcagcacagcctacatggacctgagcaggctgaaacttgacgacacggccgtgtattactgtgcgaccgcccggtgcagcggggacttgtgtccatttgactactggggccagggaaccctggtcaccgtctcctcag

SEQ ID NO: 219 - DNA, 370 bp, Artificial Sequence
  Description of Artificial Sequence: Synthetic polynucleotide
caggtgcagctggtggagtctgggggaggcgtggtccagcctgggaggtccctgagactctcctgtgcagcctctggattcagcttcagcgactatgccatgcactgggtccgccaggctccaggcaaggggctggagtgggtggcagttatatcatatgatggaagtgataaataccatgcagactccgtgaagggccgattcaccatctccagagacaatttcaagaacacgctgtatctgcaaatgaacagcctgagagatgaggacacggctgtgtattactgtgcgaagtggggagtccgagatttttggaggggcagcaattttgactactggggccagggaaccctggtcaccgtctcctcac

SEQ ID NO: 220 - DNA, 385 bp, Artificial Sequence
  Description of Artificial Sequence: Synthetic polynucleotide
caggttcagctggtgcagtctggggctgaggtgaagaaccctggggcctcagtgaaggcttccttgaaggcctctggatacaatttcagttgacactggcagtgatgagacaaaaaattcacagaggttccagggcagagtcaccattggtcaggctgagatgtgaggacacggctgtgtctgattgtgcgtttcaggcgtgggtcttctggggccagggagcccgggtcaccggtccctcaagtgggtcctcaaaacctctctcggtctggagtgcatccgccccaacccttttccccctcgtctcctgtgagaattccacctctggggcccaaaccggcccatgaccactggggccagggaaccctggtcgccgtctcctcag

SEQ ID NO: 221 - DNA, 390 bp, Artificial Sequence
  Description of Artificial Sequence: Synthetic polynucleotide
caggttcagctggtgcagtctggagctgaggtgaagaagcctggggcctcagtgaaggtctcctgtaaggcttctggttacacctttaccagctatggtatcagctgggtgcgacaggcccctggacaagggcttgagtggatgggatggatcagcgtttacaatggttacacaaactatgcacagaagctccagggcagagtcaccatgaccacagacacatccacgagcacagcctacatggaactgaggagcctgagatctgacgacacggccgtctattactgtgcgagagagggatattgtagtagtaccagttgttatggcggaaactactactactacggtatggacgtctggggccaagggaccacggtcaccgtctcctca

SEQ ID NO: 222 - DNA, 358 bp, Artificial Sequence
  Description of Artificial Sequence: Synthetic polynucleotide
gaggtccagctggtacagtctggggctgaggtgaagaagcctggggctacagtgaaaatctcttgcaaggtttctggatacaccttcaccgactcctacatacactgggtgcagcaggcccctggaaaagggcttgagtggatgggacttcttgatcctgaagatggtgaaacgatcaacgcggcgaggttgcagggcagagtcaccataaccgcggacacgtctacagacacagcctacatggagctgaggagcctgagatctgaggacacggccgtgtattactgtggatcgggcagtgaggcccactacggtattgactactggggccagggaaccctggtcaccgtctcctcag

SEQ ID NO: 223 - DNA, 369 bp, Artificial Sequence
  Description of Artificial Sequence: Synthetic polynucleotide
caggtgcagctggtggagtctgggggaggcgtggtccagcctgggaggtccctgagactctcctgtgcagcgtctggattcaccttcagtagctatggcatgcactgggtccgccaggctccaggcaaggggctggagtgggtggcagttatatggtatgatggaagtaataaatactatgcagactccgtgaagggccgattcaccatctccagagacaattcccacactgtatctgcaaatgaacagcctgagagccgaggacacggctgtgtattactgtgctagagatatggtgtagtagtaccagctgctcctcgtcttatgttaactactggggccagggaaccctggtcaccgtctcctcag

SEQ ID NO: 224 - DNA, 367 bp, Artificial Sequence
  Description of Artificial Sequence: Synthetic polynucleotide
gaggtccagctggtacagtctggggctgaggtgaagaagcctggggctacagtgaaaatctcctgcaaggtttctggatacatcttcaccgactactacatgcactgggtacaacaggcccctggaaaagggcttgagtggatgggacttgttgatcctgaagatggtgaaacaatatacgcagagaagttccagggcagagtcaccataaccgcggacacgtctacagacacagcctacatggagctgaccagcctgagatctgaggacacggccgtgtattactgtgcaaccggctacgatttttggagtggcccgaggtggttcgacccctggggccagggaaccctggtcaccgtctcctcag

SEQ ID NO: 225 - DNA, 388 bp, Artificial Sequence
  Description of Artificial Sequence: Synthetic polynucleotide
gaggtgcagctggtggagtctgggggaggcttggtacagcctggggggtccctgaaactctcctgtgcagcctctggattcaccttcagtagctataacatgaactgggtccgccaggctccagggaaggggctggagtgggtttcatacattagtagtagtagtagtgccatatactacgcagactctgtgaagggccgattcaccatctccagagacaatgccaagaactcactgtatctgcaaatgaacagcctgagacacgaggacacggctgtctattactgtgcgagaatgggaagccggcacacacgaccttatagcagtggctggtacccagacccagatgactactggggccagggaaccctggtcaccgtctcctcag

SEQ ID NO: 226 - DNA, 589 bp, Artificial Sequence
  Description of Artificial Sequence: Synthetic polynucleotide
gaggtgcagctgttggagtctgggggagacttggtacagcctggggggtccctgagactctcctgtgcagcctctggattcacgttcagcagctatgccatgagctgggtccgccaggctccagggaaggggctggagtgggtctcaactgttagtactactggtggtgacacatactatgcagactccgtgaagggccggttcaccatctccagatctgggttccaggttccactggtgaccaggtgcagctgcaggagtcgggaggaggcctgatccagcctggggggtccctgagactctcctgtgcaacctctaggttcaccgtcagtagcaactacatgagggagtgcatccgccccaacccttttccccctcgtctcctgtgagaattccacctctgggggcacagcggcccatcatatcaaggtgcagacaggcctctgggggctactccggaacaattccaagaacacactgaatctgcagatgaacagcctgagagtcgaggacacggccatatattcctgtgcgagacataatgagcttgactactggggccagggaaccctggtcaccgtctcctcag

SEQ ID NO: 227 - DNA, 352 bp, Artificial Sequence
  Description of Artificial Sequence: Synthetic polynucleotide
gaggtgcagctggtggagtctggaggaggcttgatccagcctggggggtccctgagactctcctgtgcagcctctgggttcaccgtcagtagtaattacatgagctgggtccgccaggctccagggaaggggctggagtgggtctcagttatttatagcggtggtagcacattctacgcagactccgtgaagggccgcttcaccatctccagagacaattccaagaacacgctgtatcttcaaatgaacagcctgagagccgaggacacggccgtgtattactgtgcgagagattacggtgacttctactttgactactggggccagggaaccctggtcaccgtctcctcaa

SEQ ID NO: 228 - DNA, 354 bp, Artificial Sequence
  Description of Artificial Sequence: Synthetic polynucleotide
caggtgcagctgcaggagtcgggcccacgactggtgaagccttcggagaccctgtccctcacctgcactgtctctggtggctccatcagtagttactactggagctggatccggcagcccccagggaagggactggagtggattgggtatatctattacagtgggaacaccaagtacaacccctccctcaagagtcgagtcgccatatcagtagacacgtccaagaaccagttctccctgaggctgagctctgtgaccgctgcggacacggccgtgtattactgtgcgagagtcctcgtcccaataagcggagtggacgtctggggccaagggaccacggtcaccgtctcctca

SEQ ID NO: 229 - DNA, 351 bp, Artificial Sequence
  Description of Artificial Sequence: Synthetic polynucleotide
gaggtgcagctggtggagtctgggggaggcttggtccagcctggggggtccctgagactctcctgtgcagcctctgaactcaccgtcagtagcaactacatgacctgggtccgccaggctccagggaaggggctggagtgggtctcagttatttatagcggtggtagcacattctacgcagactccgtgaagggccgattcaccatctccagagacaattccaagaacacgctgtatcttcaaatgaacagcctgagagctgaggacacggctgtgtattactgtgcgagagatctaaactactacggtatggacgtctggggccaagggaccacggtcaccgtctcctca

SEQ ID NO: 230 - DNA, 370 bp, Artificial Sequence
  Description of Artificial Sequence: Synthetic polynucleotide
gaggtccagctggtacagtctggggcggaggtgacgaagcctgggactacactgaaaatctcctgcaaggtttctggatacaactccagcgcctactacgttcactgggttcgacagactcctgaaaaaggacttcaatggatgggacttattgatcgtgagggccgtggagcaatatacgcggagacattcaagggcagagtcaccatgatcgtggacacgtctacagccacggcctacttggaagtgacccgcctgagatctgacgacacggccgtgtattattgtgctacagggccgggggcaacgagggctacaatttacggttttgcccactggggccagggaaccctggtcaccgtctcctcag

SEQ ID NO: 231 - DNA, 367 bp, Artificial Sequence
  Description of Artificial Sequence: Synthetic polynucleotide
gaggtgcagctggtggagtctgggggaggcttggtacagccggggggatccctaagactctcctgcttagcctctggattcccctttaagaattatgccatgacctgggtccgtcaggctccaggtaagggattggaatggatttcagtccttagtggtcctggaactagtataaattacgctgcctccgtgaagggccgcttcaccgtctccagggacaattccaagagcacgttatatctgcaaatgaacaggctgacagtcgaggacacggccatttattattgtgcgagaaaccggacagatctcagtggcgcggcctggtttgactcctggggccagggggtcctggtcaccgtctcctcag

SEQ ID NO: 232 - DNA, 379 bp, Artificial Sequence
  Description of Artificial Sequence: Synthetic polynucleotide
cagctgcagctgcaggagtcgggcccaggactggtgaagccttcggagaccctgtccctcacctgcactgtctctggtggctccatcagcagtagtagttactactggggctggatccgccagcccccagggaaggggctggagtggattgggagtatctattatagtgggagcacctactacaacccgtccctcaagagtcgagtcaccatatccgtagacacgtccaagaaccagttctccctgaagctgagctctgtgaccgccgcagacacggctgtgtattactgtgcgagacgtatgaactatgatagtagtggttattactacgtccactttgactactggggccagggaaccctggtcaccgtctcctcag

SEQ ID NO: 233 - DNA, 367 bp, Artificial Sequence
  Description of Artificial Sequence: Synthetic polynucleotide
caggtcaccttgaaggagtctggtcctgtgctggtgaaagccacagagaccctcacgctgacctgcaccgtctctgggttctcacacagtaatgttagaatgggtgtgagctggatccgtcagcccccagggaaggccctggagtggcttgcacacatttctccgaatgacgaaaaatcctacagtacatctctgaagagcaggctcaccatctccgaggacacttccaaaagccaggtggtccttaccatgaccaacatggaccctgtggacacagccacatattattgtgcacggccccttagccctggtttccccgatgtttttgatatttggggccaagggtcaatggtcaccgtctcttcag

SEQ ID NO: 234 - DNA, 370 bp, Artificial Sequence
  Description of Artificial Sequence: Synthetic polynucleotide
caggtgcagctggtgcagtctggggctgaggtgaagaagcctgggtcctcggtgaaggtctcctgcaaggcttctggaggcaccttcagcagctatgctatcaactgggtgcgacaggcccctggacaagggcttgagtggatgggaaggatcatccctctctttggtatagcaaactacgcacagaagttccagggcagagtcacgattaccgcggacaattccacgaccacagcctacatggagctgagcagcctgagatctgaggacacggccgtgtattattgtgcgagagcgggttattactatgatagtagtccttacccatttgactactggggccagggaaccctggtcaccgtctcctcag

SEQ ID NO: 235 - DNA, 382 bp, Artificial Sequence
  Description of Artificial Sequence: Synthetic polynucleotide
cagatcaccttgaaggagtctggtcctacgctggtgaaacccacacagaccctcacgctgacctgcaccttctctgggttctcactcagcactagtggagtgggtgtgggctggatccgtcagcccccaggaaaggccctggagtggcttgcactcatttattgggatgatgataagcgctacagcccatctctgaagagcaggctcaccatcaccaaggacacctccaaaaaccaggtggtccttacaatgaccaacatggaccctgtggacacagccacatattactgtacacacagaccgatacctgcagctggtacgttagttttcctcaactggttcgacccctggggccagggaaccctggtcaccgtctcctcag

SEQ ID NO: 236 - DNA, 366 bp, Artificial Sequence
  Description of Artificial Sequence: Synthetic polynucleotide
caggtgcagctggtgcagtctggggctgaggtgaagaagcctggggcctcagtgaaggtctcctgcaaggcttctggatacaccttcaccagttatgatatcaactgggtgcgacaggccactggacaagggcttgagtggatgggatggatgaaccctaacagtggtaacacaggctatgcacagaagttccagggcagagtcaccatgaccaggaacacctccataagcacagcctacatggagctgagcagcctgagatctgaggacacggccgtgtattactgtgcgagaggctatggacgatttttggagtggactactttgactactggggccagggaaccctggtcaccgtctcctcag

SEQ ID NO: 237 - DNA, 361 bp, Artificial Sequence
  Description of Artificial Sequence: Synthetic polynucleotide
cagctgcagctgcaggagtcgggcccaggactggtgaagccttcggagaccctgtccctcacctgcactgtctctggtggctccatcagcagtagtagttactactggggctggatccgccagcccccagggaaggggctggagtggattgggagtatctattatagtgggagcacctactacaacccgtccctcaagagtcgagtcaccatatccgtagacacgtccaagaaccagttctccctgaagctgagctctgtgaccgccgcagacacggctgtgtattactgtgcgagccaacagtggctacgagggaactttgactactggggccagggaaccctggtcaccgtctcctcag

SEQ ID NO: 238 - DNA, 370 bp, Artificial Sequence
  Description of Artificial Sequence: Synthetic polynucleotide
caggtgcagctggtgcagtctggggctgaggtgaagaagcctgggtcctcggtgaaggtctcctgcaaggcttctggaggcaccttcagcaactatgctatcaactgggtgcgacaggcccctggacaagggcttgagtggatgggaaggatcatccctatgtttgatatagcaaactacgcacagaagttccagggcagagtcacgattaccgcggacaaatccacgagcacagcctacatggagctgagcagcctgagatctgaggacacggccgtatattactgtgcgagagcggggtattactatgatagtagtggttacccatttgactactggggccagggaaccctggtcaccgtctcctcag

SEQ ID NO: 239 - DNA, 370 bp, Artificial Sequence
  Description of Artificial Sequence: Synthetic polynucleotide
caggtccagctggtgcagtctggggctgaagtgaagcacctctggggatctgtgaaggccccctgcaaggcttctggaggcaccttcagcagctatgctatcaactgggtgcgacaggcccctggacaagggcttgagtggatgggaaggatcatccctatgtttggtatagcaaactacgctcagaagttccagggcagagtcacgattaccgcggacaaatccacgagcacagcctacatggagctgagcagcctgagatctgaggacacggccgtgtattactgtgcgagagcgggttattactatgagagtagtggttatcactttgactactggggccagggaaccctggtcaccgtctcctcag

SEQ ID NO: 240 - DNA, 378 bp, Artificial Sequence
  Description of Artificial Sequence: Synthetic polynucleotide
caggttcagctggtgcagtctggagctgaggtgaagaagcctggggccttattgagggtctcctgcaaggcttccggtgacacctctactaaccatggcatcagctgggtgcgacaggcccctggacaagggcttgagtggatgggatggatcaacgtttacaatggtagaacaaactatgcacagaaggtccagggcagagtcaccatgaccacagacacatccacgaggacagcctatatggagctgaggagcctgagatctgacgacacggccgtgtattattgtgcgagatggattcatcgggattttgactggttaccatatggcatgtttatggacgtctggggccaagggaccacggtcaccgtctcctca

SEQ ID NO: 241 - DNA, 349 bp, Artificial Sequence
  Description of Artificial Sequence: Synthetic polynucleotide
gaggtgcagctggtggagtctggaggaggcttgatccagcctggggggtccctgagactctcctgtgcagcctctgaattcatcgtcagtagcaactacatgagttgggtccgccaggctccagggaaggggctggagtgggtctcagttatttatagcggtggtagcacattctacgcagactccgtgaagggccgattcaccatctccagagacaattccaagaacacgctatatcttcaaatgaacagcctgagagccgaggacacggccgtgtattactgtgcgagacaattgggtgactacgttgactactggggccagggaaccctggtcaccgtctcctcag

SEQ ID NO: 242 - DNA, 373 bp, Artificial Sequence
  Description of Artificial Sequence: Synthetic polynucleotide
caggtccagctggtgcaatctggggctgaggtgaagaagcctgggtcctcggtgaaggtctcctgcaaggcttctggaggcaccttcagcagctatcctatcagctgggtgcgacaggcccctggacaagggcttgagtggatgggaaggatcatccctatccttggtatagcaaactacgcacagaagttccagggcagagtcacgattaccgcggacaaatccacgagcacagcctacatggagctgagcagcctgagatctgaggacacggccgtgtattactgtgcgagagatcgaggttactctggttcagggagtctgtactactttgactcctggggccagggaaccctggtcaccgtctcctcag

SEQ ID NO: 243 - DNA, 354 bp, Artificial Sequence
  Description of Artificial Sequence: Synthetic polynucleotide
gaggtgcagctggtggagtctggaggaggcttgatccagcctggggggtccctgagactctcctgtgcagcctctggggtcaccgtcagtagcaactacatgagctgggtccgccaggctccagggaaggggctggagtgggtctcagttatttatagcggtggtagcacatactacgcagactccgtgaagggccgattcaccatctccagagacaattccaagaacacgctgtatcttcaaatgaacagcctgagagtcgaggacacggccgtgtattactgtgcgagagatctggctgagcggggcggtatggacgtctggggccaagggaccacggtcaccgtctcctca

SEQ ID NO: 244 - DNA, 364 bp, Artificial Sequence
  Description of Artificial Sequence: Synthetic polynucleotide
gaggtgcagctggtggagtctggaggaggcttgatccagcctggggggtccctgagactctcctgtgcagcctctgggttcaccgtcagtagcaactacatgagctgggtccgccaggctccaaagaaggggctggagtgggtctcagttatttatagcggtggtagcacatactacgcagactccgtgaagggccgattcaccatctccagagacaattccaagaacacgctgtatcttcaaatgaacagcctgagagccgaggacacggccgtgtattactgtgcgagagaaggggcagcagctaatacccatgggtggttcgacccctggggccagggaaccctggtcaccgtctcctcag

SEQ ID NO: 245 - DNA, 381 bp, Artificial Sequence
  Description of Artificial Sequence: Synthetic polynucleotide
caggtacagctgcagcagtcaggtccaggactggtgaagccctcgcagaccctctcactcacctgtgccatctccggggacagtgtctcttacaacagtgctgcttggaactggatcaggcagtccccatcgagaggccttgagtggctgggaaggacatactacaggtccaactggtataatgattatgcagtatctgtgaaaagtcgaataaccatcaacccagacacatccaagaaccagttctccctgcagctgaactctgtgactcccgaggacacggctgtgtattactgtgcaagagctccgggtatagcagctcgtctgggcctctacggtatggacgtctggggccaagggaccacggtcaccgtctcctca

SEQ ID NO: 246 - DNA, 363 bp, Artificial Sequence
  Description of Artificial Sequence: Synthetic polynucleotide
caggtgcagctgcaggagtcgggcccaggactggtgaagccttcggagaccctgtccctcacctgcactgtctctggtggctccatcagtagttactactggagctggatccggcagcccccagggaagggactggagtggattgggtatatctattacagtgggagcaccaactacaacccctccctcaagagtcgagtcaccatatcagtagacacgtccaagaaccagttctccctgaagctgagctctgtgaccgctgcggacacggccgtgtattactgtgcgagagggaccttcacattaggctactactacggtatggacgtctggggccaagggaccacggtcaccgtctcctca

SEQ ID NO: 247 - DNA, 381 bp, Artificial Sequence
  Description of Artificial Sequence: Synthetic polynucleotide
caggtgcagctggtggagtctgggggaggcgtggtccagcctgggaggtccctgagactctcctgtgcagcgtctggattcaccttcagtaactatggcatgcactgggtccgccaggctccaggcaaggggctggagtgggtggcacttatatggtatgatggaagtaataaatactatgtagactccgtgaagggccgattaaccatctccagagacaattccaagaacacgctgtatctgcaaatgaacagcctgagagccgaggacacggctgtgtattactgtgcgagaggtgccgacattttgactggttattataattactactactatggtatggacgtctggggccaggggaccacggtcaccgtctcctca

SEQ ID NO: 248 - DNA, 400 bp, Artificial Sequence
  Description of Artificial Sequence: Synthetic polynucleotide
caggtacagctgcagcagtcaggtccaggactggtgaagccctcgcagaccctctcactcacctgtgccatctccggggacagtgtctctagcgacagtgctacttggaactggatccgacagtccccatcgagaggccttgagtggctgggaaggacatactacaggtccaagtggtataatgattatgtagtatctgtgaaaagtcgaatatccatcaacccagacacatccaagaaccagttctccctgcagctgaactctgtgactcccgaggacacggctgtgtattactgtgcaagagattggggccctcaatattgtagtggtggtagttgctactcgacctcgcggtggttcgacccctggggccagggaaccccggtcaccgtctcctcag

SEQ ID NO: 249 - DNA, 331 bp, Artificial Sequence
  Description of Artificial Sequence: Synthetic polynucleotide
gaggtgcagctggtggagtctggggtgaggtgtcgctggtagtatctggtgggaggtctgatttcaccggcggggtccatgacattatccagtgcatcctctacatccctcttccttatcgactacatgaagaagtgcatcccccgcggcccttttcccccacatctccagtgagaataccacctctgggggcacaccggacccaaatatcagagcgcacagactcctctgaggacacacctgacaaccgaggacacggccgtatatttctgtgcgagacataatgagcttgactactggggccaaggaaccctggtcaccgtctcctcag

SEQ ID NO: 250 - DNA, 355 bp, Artificial Sequence
  Description of Artificial Sequence: Synthetic polynucleotide
caggtgcagctgcaggagtcgggcccaggactggtgaagccttcacagaccctgtccctcacctgcactgtctctggaggctccatcagccgtgctggttactactggagctggatccgccagcacccagggaagggcctggagtggattgggtacatcttttacagtgggagcacctactacaacccgtccctcaagagtcgagttaccatatcagaagacacgtctaagaaccagttctccctgaagctgagctctgtgactgccgcggacacggccgtgtattactgtgcctcttcgggccgacttactatttactactggggccagggaaccctggtcaccgtctcctcag

SEQ ID NO: 251 - DNA, 378 bp, Artificial Sequence
  Description of Artificial Sequence: Synthetic polynucleotide
caggttcagctggtgcagtctggagctgaggtgaagaagcctggggccttactgagggtctcctgcaaggcctccggtgacacctctactaaccatggcatcagctgggtgcgacaggcccctggacaagggcttgagtggatgggatggatcaacgtttacaatggtagaacaaactatgcacagaaggtccagggcagagtcaccatgaccacagacacatccacgagcacagcctatatggagctgaggagcctgagatctgacgacacggccgtgtattattgtgcgagatggattcatcgggattttgactggttaccatatggcatgtttatggacgtctggggccaagggaccacggtcaccgtctcctca

SEQ ID NO: 252 - DNA, 379 bp, Artificial Sequence
  Description of Artificial Sequence: Synthetic polynucleotide
caggtgcagctggtggagtctgggggaggcgtggtccagcctgggaggtccctgagactctcctgtgcagcgtctggattcaccttcagtagctatggcatgcactgggtccgccaggctccaggcaaggggctggagtgggtggcagttatatggtatgatggaagtaataaatactatgcagactccgtgaagggccgattcaccatctccagagacaattccaagaacacgctgtatctgcaaatgaacagcctgagagccgaggacacggctgtgtattactgtgcgagagaatttggatcgaccccaatttacgatattatgactggcccctttgactactggggccagggaaccctggtcaccgtctcctcag

SEQ ID NO: 253 - DNA, 367 bp, Artificial Sequence
  Description of Artificial Sequence: Synthetic polynucleotide
caggtgcagctggtgcagtctggggctgaggtgaagaagcctgggtcctcggtgaaggtctcctgcaaggcttctggaggcaccttcagcaactatgctatcagctgggtccgacaggcccctggacaagggcttgagtggatgggagggatcatccctatctttgatacaacaaactactcacagaagttccagggcagagtcacgtttaccgcggacgaatccaccggcacagcctacatggagctgagcagcctgagatctgaggacacggccatctattactgtgccagactgcaaaatgataggttatttttgagctggttcgacccctggggccagggaaccctggtcaccgtctcctcag

SEQ ID NO: 254 - DNA, 386 bp, Artificial Sequence
  Description of Artificial Sequence: Synthetic polynucleotide
caggtgcagctggtgcagtctggggcacagcggccatcatatcagcggtgcagacacaccctcttgggggcacagccggcccacagagtgtcgtcagctatgctatcagctgggtgggacaagcccctggacaagggcttggactgcgatggagaaggatcctccctctctttgggatagcaaactacgcacagaagttccaaggcaaagtcacgattaccccggacaacttccaccaccatcagccctacctggagctcagcagcctgacatctgaggacacggccgtgtattattgagcgagagcgggttattactatgatatctactcctgtacccatttgactactggggcctagggaaccgctaggtcaccgtctcctcag

SEQ ID NO: 255 - DNA, 369 bp, Artificial Sequence
  Description of Artificial Sequence: Synthetic polynucleotide
caggtgcagctggtgcagtctggggctgaggtgaagaagcctgggtcctcggtgaaggtctcctgcaaggcttctggaggcaccttcagcagctatgctatcacctgggtgcgacaggcccctggacaagggcttgagtggatgggagggatcatccctatctttggtagagcaaactacgcacagaagttccagggcagagtcacgattaccgcggacgaatccacgagcacagcctacatggagctgagcagcctgagatctgaggacacggccgtgtattactgtgcgagagtggttattactggtttggactactactacggtatggacgtctggggccaagggaccacggtcaccgtctcctca

SEQ ID NO: 256 - DNA, 370 bp, Artificial Sequence
  Description of Artificial Sequence: Synthetic polynucleotide
caggtcaccttgagggagtctggtcctgcgctggtgaaacccacacagaccctcacactgacctgcaccttctctgggttctcactcagcactagtggaatgtgtgtgagctggatccgtcagcccccagggaaggccctggagtggcttgcactcattgattgggatgatgataaatactacagcacatctctgaagaccaggctcaccatctccaaggacacctccaaaaaccaggtggtccttacaatgaccaacatggaccctgtggacacagccacgtattactgtgcacggataaatgcgtatagcagcagctggcccacatttgactactggggccagggaaccctggtcaccgtctcctcag

SEQ ID NO: 257 - DNA, 370 bp, Artificial Sequence
  Description of Artificial Sequence: Synthetic polynucleotide
caggtgcagctggtggagtctgggggaggcgtggtccagcctgggaggtccctgagactctcctgtgcagcgtctggattcaccttcagtagctatggcatgcactgggtccgccaggctccaggcaaggggctggagtgggtggcatttatatggtatgatggaagtaatatatactatacagactccgtgaagggccgcttcaccatctccagagacaattccaagaacacgctgtatctgcaaatgaacagcctgagagccgaggacacggctgtgtattactgtgcgagagatcgagtcgatagcagcagctggggcttttactttgactactggggccagggaaccctggtcaccgtctcctccg

SEQ ID NO: 258 - DNA, 381 bp, Artificial Sequence
  Description of Artificial Sequence: Synthetic polynucleotide
caggtgcagctggtggagtctgggggaggcttggtcaagcctggagggtccctgagactctcctgtgcagcctctggattcaccttcagtgactactacatgagctggatccgccaggctccagggaaggggctggagtgggtttcatacattagtggtactggtagtaccatatactacgcagactctgtgaagggccgattcaccatctccagggacaacgccaagaactcactgtatctgcaaatgaacagcctgagagccgcggacacggccgtgtattactgtgcgagagatgcagtggctggccctcgaagggaactttactactactacggtatggacatctggggccaagggaccacggtcaccgtctcctca

SEQ ID NO: 259 - DNA, 370 bp, Artificial Sequence
  Description of Artificial Sequence: Synthetic polynucleotide
cagctgcagctgcaggagtcgggcccaggactggtgaagccttcggagaccctgtccctcacctgcactgtctctggtggctccatcagcagtagtagttactactggggctggatccgccagcccccagggaaggggccggagtggattgggagtatctattatggtgggaccacctattataacccgtccctcaggagtcgagtcaccatatccttagacatgtccaagaaccagatctccctgaagctgagctctgtgaccgccacagacacggctgtgtattactgtgcgaggtcctcatcggggttttcctatgatactcccctcgacccctggggccagggaaccctggtcatcgtctcctcag

SEQ ID NO: 260 - DNA, 367 bp, Artificial Sequence
  Description of Artificial Sequence: Synthetic polynucleotide
caggtccagctggtacagtctggggctgaggtgaagaagcctggggcctcagtgaaggtctcctgcaaggtttccggatataccctccctgaattatccatgcactgggtgcgacaggctcctggaaaagggcttgagtggatgggaggttttcatcctgaagatggtgaaacaatctacgcacagaagttccagggcagagtcaccatgaccgaggacacatctacagacacagcctacatggagctgagcagcctgagatctgaggacacggccgtgtattactgtgcaacaggcagtccctttggagtggttactgactggttcgacccctggggccggggaaccctggtcaccgtctcctcag

SEQ ID NO: 261 - DNA, 385 bp, Artificial Sequence
  Description of Artificial Sequence: Synthetic polynucleotide
caggtgcagctgcaggagtcgggcccaggactggtgaagccttcacagaccctgtccctcacctgcactgtctctggtggctccatcagcagtggtgattattactggagttggatccgccagcccccagggaagggcctggaatggattgggtacatctattacagtgggagcacctactacaacccgtccctcaagagtcgagttaccatatcagtagacacgtccaagaaccagttctccctgaagctgagctctgtgactgccgcagacacggccgtgtattactgtgccagaggccaatcacacgtattactatggttcggggagttattaggctggttcgacccctggggccagggaaccctggtcaccgtctcctcag

SEQ ID NO: 262 - DNA, 367 bp, Artificial Sequence
  Description of Artificial Sequence: Synthetic polynucleotide
caggtgcagctgcaggagtcgggcccaggactggtgaagccttcggggaccctgtccctcacctgcgctgtctctggtggctccatcagcagtggtcactggtggacttgggtccgccagcccccagggaaggggctggagtggattggggaaatctatcatagtgggaacaccaactacaatacgtccctcaagagtcgagttaccatatcagtagacaagtccaacaaccagttctccctcaagctgacgtctgtgaccgccgcggacacggccgtgttttactgtgcgagaagatattgtagtggtggtacctgctccccctttgactactggggccagggaaccctggtcaccgtctcctcag

SEQ ID NO: 263 - DNA, 381 bp, Artificial Sequence
  Description of Artificial Sequence: Synthetic polynucleotide
caggtgcagctggtgcagtctggggctgagatgaagaagcctggggcctcagtgaaggtttcctgcaaggcatctggatacatcttcaccacgtactatatgcactgggtgcgacaggcccctggacaagggcttgagtggatgggaataatcaaccccagtgatggcagcacaagtaacgcacagaacttccagggcagagtcaccatgaccagggacacgtccacgagcacagtgtacatggagctgagcagcctgagatctgaggacacggccgtttattactgtgcgagagacatcacagtaactacgagggacgtatacgactactactacggaatggacgtctggggccaagggaccacggtcaccgtctcctca

SEQ ID NO: 264 - DNA, 367 bp, Artificial Sequence
  Description of Artificial Sequence: Synthetic polynucleotide
caggtccagctggtacagtctggggctgaggtgaagaagcctggggcctcagtgaaggtctcctgcaaggtttccggatacaccctcattgaattatccatgcactgggtgcgacaggctcctggaaaagggcttgagtggatgggaggttttgatcctgaagatggtgaaacaatctacgcacagaagttccagggcagagtcaccatgaccgaggacacatctacagacacagcctacatggagctgagcagcctgagatctgaggacacggccgtgtattactgtgcaacaggcagtccctttggagtggttactagctggttcgacccctggggccagggaaccctggtcaccgtctcctcag

SEQ ID NO: 265 - DNA, 354 bp, Artificial Sequence
  Description of Artificial Sequence: Synthetic polynucleotide
caggtgcagctggtgcagtctggggctgaggtgaagaagcctgggtcctcggtgaaggtctcctgcaaggcttctggaggcaccttcagcagctatggtatcagctgggtgcgacaggcccctggacaagggcttgagtggatgggagggaccatccctatctttggaacagcaaactacgcacagaagttccagggcagagtcacgattaccgcggacgaatccacgagcacagcctacatggagctgagcagcctgagatctgaggacacggccgtgtattactgttctgggttcggtggtgatgacggtatggacgtctggggcccagggaccacggtcaccgtctcctca

SEQ ID NO: 266 - DNA, 361 bp, Artificial Sequence
  Description of Artificial Sequence: Synthetic polynucleotide
caggtgcagctgcaggagtcgggcccaggactggtgaagccttcacagaccctgtccctcacctgcactgtctctggtgactccatcagcagtggtagttactactggagctggatccggcagcccgccgggaaggggctggagtggattgggcgtatctataccgatgggagcaccaactacaacccctccctcaagagtcgagtcaccatatcagtagacacgtccaagaaccagttctccctgaagctgagctctctgaccgccgcagacacggccgtgtattactgtgcgagggacgtggatatagtgggcgtctttgactactggggccagggaaccctggtcaccgtctcctcag

SEQ ID NO: 267 - DNA, 370 bp, Artificial Sequence
  Description of Artificial Sequence: Synthetic polynucleotide
gaggtgcagctggtggagtctgggggaggcttggtacagcctggggggtccctgagactctcctgtgcagcctctggattcaccttcagtagctatagcatgaactgggtccgccaggctccagggaaggggctggagtgggtttcatacattagtagtagtagtagtaccatatactacgcagactctgtgaagggccgattcaccatctccagagacaatgccaagaactcactgtatctgcaaatgaacagcctgagagacgaggacacggctgtgtattactgtgcgagaatggctatagtgggagcttacgccaactggggctttgactactggggccagggaaccctggtcaccgtctcctcag

SEQ ID NO: 268 - DNA, 372 bp, Artificial Sequence
  Description of Artificial Sequence: Synthetic polynucleotide
caggtgcagctgcaggagtcgggcccaggactggtgaagccttcggggaccctgtccctcacctgcgctgtctctggtggctccatcagcagtagtaactggtggagttgggtccgccagcccccagggaaggggctggagtggattggggaaatctatcatagtgggagcaccaactacaacccgtccctcaagagtcgagtcaccatatcagtagacaagtccaagaaccagttctccctgaagctgagctctgtgaccgccgcggacacggccgtgtattactgtgcgagagcggctacaatcctcgggctttactactactacggtatggacgtctggggccaagggaccacggtcaccgtctcctca

SEQ ID NO: 269 - DNA, 387 bp, Artificial Sequence
  Description of Artificial Sequence: Synthetic polynucleotide
caggtgcagctggtggagtctgggggaggcgtggtccagcctgggaggtccctaagactctcctgtgcagcctctggattcaccttcagtacctatggcatgcactgggtccgccaggctccaggcaaggggctggagtgggtggcagttatatcatacggtggaagtaataaagactatgcagactccgtgaagggccgattcaccatctccagagacaattccaagaacacgctgtatctgcaaatgaacagcctgagagctgaggacacggctgtgtattactgtgcgcaactagagggggactcaaacagttatggttacgattactactactactacggtatggacgtctggggccaagggaccacggtcaccgtctcctca

SEQ ID NO: 270 - DNA, 367 bp, Artificial Sequence
  Description of Artificial Sequence: Synthetic polynucleotide
gaggtgcagctggtggagtctggaggaggcttgatccagcctggggggtccctgagactctcctgtgcagcctctgggttcaccgtcagtagcaactacatgagctgggtccgccaggctccagggaaggggctggagtgggtctcagttatttatagcggtggtagcacatactacgcagactccgtgaagggccgatttatcatctccagagacaattccaagaacacgctgtatcttcaaatggacagcctgagagccgaggacacggccgtgtattactgtgcgagaggggacatagtgggagctacttgggatcccgcttttgacatctggggccaagggacactggtcaccgtctcttcag

SEQ ID NO: 271 - DNA, 367 bp, Artificial Sequence
  Description of Artificial Sequence: Synthetic polynucleotide
caggtcaccttgaaggagtctggtcctgtgctggtgaaagccacagagaccctcacgctgacctgcaccgtctctgggttctcacacagcaatgttagaatgggtgtgagttggatccgtcagcccccagggaaggccctggagtggcttgcacacatttcttcgaatgacgaaaaatcctacagtacatctctgaagagcagactcaccatctccggggacacttccaaaagccaggtggtccttaccatgaccaacgtggaccctgtggacacagccgcatattactgtgcacggccccttaaccctggtttccccgatgtttttgatatttggggccaagggacaatggtcaccgtctcctcag

SEQ ID NO: 272 - DNA, 370 bp, Artificial Sequence
  Description of Artificial Sequence: Synthetic polynucleotide
caggtgcagctgcaggagtcgggcccaggactggtgaagccttcacagaccctgtccctcacctgcactgtctctggtggctccatcagcagtggtggttactactggagctggatccgccagcacccagggaagggcctggagtggattgggtacatctattacagtgggagcacctactacaacccgtccctcaagagtcgagttaccatatcagtagacacgtctaagaaccagttttccctgaagctgagctctgtgactgccgcggacacggccgtgtattactgtgcgagagcggatattgtagtagtaccagctgccgcctttgactactggggccagggaaccctggtcaccgtctcctcag

SEQ ID NO: 273 - DNA, 358 bp, Artificial Sequence
  Description of Artificial Sequence: Synthetic polynucleotide
gaagtgcagctggtggagtctgggggagccgtggtacagcctggggggtccctgagactctcctgtgcagcctctggattcacctttgatgcttatactatgcactgggtccgtcaaactccggggcggggtctggagtggctctctcttattagttgggatgggagcacattctatgcagagtctctgaagggccgattcaccgtctccagagacaacagcaaaaactccctgtatttgcaaatgagcagtctgagagctgacgacaccgccttatattactgtgcgaaggctaaagacccgtacactgagtactttgactactggggccagggaaccctggtcaccgtctcctcag

SEQ ID NO: 274 - DNA, 372 bp, Artificial Sequence
  Description of Artificial Sequence: Synthetic polynucleotide
gaggtgcagctggtggagtctggaggaggcttgatccagcctggggggtccctgagactctcctgtgcagcctctgggttcaccgtcagtagcaactacatgagctgggtccgccaggctccagggaaggggctggagtgggtctcagttatttatagcggtggtagcacatactacgcagactccgtgaagggccgattcaccatctccagagacaattccaagaacacgctgtatcttcaaatgaacagcctgagagccgaggacacggccgtgtattactgtgcgagaggcgagtataactggaacgacgaggactactactacggtatggacgtctggggccaagggaccacggtcaccgtctcctca

SEQ ID NO: 275 - DNA, 382 bp, Artificial Sequence
  Description of Artificial Sequence: Synthetic polynucleotide
gaggtgcagctggtggagtctgggggaggcctggtcaagcctggggggtccctgagactctcctgtgcagcctctggattcaccttcagtagctatagcatgaactgggtccgccaggctccagggaaggggctggagtgggtctcatccattagttttagaagtagttacatatactacgcagattcagtgaagggccgattcaccatctccagagacaacgccaagaactcactgtatctgcaaatgaacagcctgagagccgaggacacggctgtgtattactgtgcgagagtaagaaaccattactatgatagtagtggttattaccccgatgcttttgatatctggggccaagggacaatggtcaccgtctcttcag

SEQ ID NO: 276 - DNA, 364 bp, Artificial Sequence
  Description of Artificial Sequence: Synthetic polynucleotide
caggtgcagctggtgcagtctggggctgaggtgaagaagcctggggcctcagtgaaggtctcctgcaaggcttctggatacaccttcgccggctactatatgcactgggtgcgacaggcccctggacaagggcttgagtggatgggacggatcaaccctaacagtggtggcacaaactatgcacagaagtttcagggcagggtcaccatgaccagggacatgtccatcagcacagcctacatggagctgagcaggctgagatctgacgacacggtcgtgtattactgtgcgagagaaaaccggggcagtggccgaggctggttcgacccctggggccagggaaccctggtcaccgtctcctcag

SEQ ID NO: 277 - DNA, 382 bp, Artificial Sequence
  Description of Artificial Sequence: Synthetic polynucleotide
gaggtgcagctggtggagtctgggggaggcttggtaaagcctggggggtcccttagactctcctgtgcagcctctggtttcactttcagtaacgcctggatgaactgggtccgccaggctccagggaaggggctggagtgggtcggccgtattaaaagcaaaactgatggtgggacaacagactacgctgcacccgtgaaaggcagattcaccatctcaagagatgattcaaaaaacacgctgtatctgcaaatgaacagcctgaaaaccgaggacacagccgtgtattactgtaccacagatcggatttatgattacgtttgggggagttatcgttataaggactactggggccagggaaccctggtcaccgtctcctcag

SEQ ID NO: 278 - DNA, 388 bp, Artificial Sequence
  Description of Artificial Sequence: Synthetic polynucleotide
gaggtgcagctggtggagtctgggggaggcttggtccagcctggggggtccctgagactctcctgtgcagcctctggattcacctttagtagctattggatgagctgggtccgccaggctccagggaaagggctggagtgggtggccaacataaagcaagatggaagtgagaaatactatgtggactctgtgaagggccgattcaccatctccagagacaacgccaagaactcactgtatctgcaaatgaacagcctgagagccgaggacacggctgtgtattactgtgcgagggatgaatccacgtattactatgatagtagtggttattactacgagggttactttgactactggggccagggaaccctggtcaccgtctcctcag

SEQ ID NO: 279 - DNA, 370 bp, Artificial Sequence
  Description of Artificial Sequence: Synthetic polynucleotide
caggtgcagctggtggagtctgggggaggcgtggtccagcctgggaggtccctgagactctcctgtgcagcctctggattcaccttcagtagctatgctatgcactgggtccgccaggctccaggcaaggggctggagtgggtggcagttatatcatatgatggaagcaataaatactacgcagactccgtgaagggccgattcaccatctccagagacaattccaagaacacgctgtatctgcaaatgaacagcctgagagctgaggacacggctgtgtattactgtgcgagagatctacatgagtgggagctactggccgcgggccttgactactggggccagggaaccctggtcaccgtctcctcag

SEQ ID NO: 280 - DNA, 355 bp, Artificial Sequence
  Description of Artificial Sequence: Synthetic polynucleotide
gaggtccagctggtacagtctggggctgaggtgaagaagcctggggttacagtgaaaatctcctgcaaggtttctggatacaccttcaccgactactacatgcactgggtgcaacaggcccctggaaaagggcttgagtggatgggacttgttgatcctgaagatggtgaaacaatatacgcagagaagttccagggcagagtcaccataaccgcggacacgtctacagacacagcctacatggagctgagcagcctgagatctgaggacacggccgtgtattactgtgcaacgtctgcagtgggagctactctaggctactggggccagggaaccctggtcaccgtctcctcag

SEQ ID NO: 281 - DNA, 358 bp, Artificial Sequence
  Description of Artificial Sequence: Synthetic polynucleotide
gaagtgcagctggtgcagtctggagcagaggtgaaaaagcccggggagtctctgaggatctcctgtaagggttctggatacagctttaccagctactggatcagctgggtgcgccagatgcccgggaaaggcctggagtggatggggaggattgatcctagtgactcttataccaactacagcccgtccttccaaggccacgtcaccatctcagctgacaagtccatcagcactgcctacctgcagtggagcagcctgaaggcctcggacaccgccatgtattactgtgcgagactagtccctgggcagtggcattttgactactggggccagggaaccctggtcaccgtctcctcag

SEQ ID NO: 282 - DNA, 381 bp, Artificial Sequence
  Description of Artificial Sequence: Synthetic polynucleotide
cagatcaccttgaaggagtctggtcctacgctggtgaaacccacacagaccctcacgctgacctgcaccttctctgggttctcactcagcactagtggagtgggtgtgggctggatccgtcagccccccggaaaggccctggagtggcttgcactcacttattgggatgatcataagcgctacagcccatctctgaagagcagactcaccatcaccaaggacacctccaaaaaccaggtggtccttacaatgaccaacatggaccctatggacacagccacatattattgtgcacaccgaaacccttacggtggtgaagcgggctactactactacggtttggacgtctggggccaagggaccacggtcaccgtctcctca

SEQ ID NO: 283 - DNA, 376 bp, Artificial Sequence
  Description of Artificial Sequence: Synthetic polynucleotide
gaggtgcagctggtggagtctgggggaggcttggtacagcctggggggtccctgagactctcctgtgcagcctctggattcaccttcagtgactacagtatgaactgggtccgccaggctccagggaaggggctggagtgggtttcatacgttagtagtcgtggtagtgacatatactacgcagactctgtgaagggccgattcaccatctccagagacaatgccaagaactcactgtggctgcaaatgaacagcctgacagacgaggacacggctgtatattactgtgcgagagatcccacgtcagggttaccatttttgggggtctcggcttttgatatctggggccaagggacaatggttaatgtctcttcag

SEQ ID NO: 284 - DNA, 382 bp, Artificial Sequence
  Description of Artificial Sequence: Synthetic polynucleotide
gaggtgcagctggtggagtctgggggaggcttggtaaagcctggggggtcccttagactctcctgtgcagcctctggattcactttcagtaacgcctggatgagctgggtccgccaggctccagggaaggggctggagtgggttggccgtattaaaagcaaaactgatggtgggacaacagactacgctgcacccgtgaaaggcagattcaccatctcaagagatgattcaaaaaacacgctgtatctgcaaatgaacagcctgaaaaccgaggacacagccgtgtattactgtaccacagatcgggattatgattacatttgggggagttatcgttatcgcgactactggggccagggaaccctggtcaccgtctcctcag

SEQ ID NO: 285 - DNA, 372 bp, Artificial Sequence
  Description of Artificial Sequence: Synthetic polynucleotide
caggtgcagctacagcagtggggcgcaggactgttgaagccttcggagaccctgtccctcacctgcgctgtttatggtgggtccctcagtggttactactggagctggatccgtcagcccccagggagggggctggaatggattggggaaatcagtcatgatggaaacaccaaatacaacccgtccctcaagagtcgactcaccatctcagtagacatgtccaacaaccacttctctctgaagttgagttctgtgaccgccgcggacacggctgtctattactgtgcgagaatggtggttcagggccatcttcagccttattactatgggatggacgtctggggccaagggaccacagtcaccgtctcctca

SEQ ID NO: 286 - DNA, 375 bp, Artificial Sequence
  Description of Artificial Sequence: Synthetic polynucleotide
caggtgcagctggtggagtctgggggaggcgtggtccagcctgggaggtccctgagactctcctgtgcagcctctggattcaccttcagtagctatgctatgcactgggtccgccaggctccaggcaaggggctggagtgggtggcagttatatcatatgatggaagcaataaatactacgcagactccgtgaagggccgattcaccatctccagagacaattccaagaacacgctgtatctgcaaatgaacagcctgagagctgaggacacggctctgtattactgtgcgagccatgatggagtaactgaaacgacgtggaaatattacgctatggacgtctggggccaagggaccacggtcaccgtctcctca

SEQ ID NO: 287 - DNA, 384 bp, Artificial Sequence
  Description of Artificial Sequence: Synthetic polynucleotide
caggtgcagctggtggagtctgggggaggcgtggtccagcctgggaggtccctgagactctcctgtgcagcgtctggattcaccttcagtagctatggcatgcactgggtccgccaggctccaggcacggggctggagtgggtggcagttatatggtatgatgtaagtaataactacaatgcagactccctgaagggccgattcaccatctccagagacaattccaagaacacgctgtatctgcaaatgaacagcctgagagccgaggacacggctgtgtattactgtgcgagagacgatagcagtggctggtaccgacccctttactactactactacggtatggacgtctggggccaagggaccacggtcaccgtctcctca

SEQ ID NO: 288 - DNA, 387 bp, Artificial Sequence
  Description of Artificial Sequence: Synthetic polynucleotide
caggtgcagctgcaggagtcgggcccaggactggtgaagccttcacagaccctgtccctcacctgcactgtctctggtggctccattaccagtggtaattactactggacctggatccggcagcccgccgggaaggggctggagtggattgggcgtatcgataccagtgggagcaccaattacaacccctccctcaagagtcgagtcaccacatccttagacacgtccaagaaccagttttctctgaaactgagctctgtgaccgccgcagacacggccgtgtattactgtgcgagagaagtggccttttttgactggttattacaaagcgactactatcacggtatggacgtctggggccaagggaccacggtcaccgtctcctca

SEQ ID NO: 289 - DNA, 373 bp, Artificial Sequence
  Description of Artificial Sequence: Synthetic polynucleotide
caggtgcagctggtggagtctgggggaggcgtggtccagcctgggaggtccctgagactctcctgtgcagcctctggattcaccttcagtagctatggcatgcactgggtccgccaggctccaggcaaggggctggagtgggtggcagttatatcatatgatggaagtaataaatactatgcagactccgtgaagggccgattcaccatctccagagacaattccaagaacacgctgtatctgcaaatgaacagcctgagagctgaggacacggctgtgtattactgtgcgaaagtttcccatgattttggtgactacggtgactacgagtttgactactggggccagggaaccctggtcaccgtctcctcag

SEQ ID NO: 290 - DNA, 361 bp, Artificial Sequence
  Description of Artificial Sequence: Synthetic polynucleotide
caggtgcagctggtgcagtctggggctgaggtgaagaagcctgggtcctcggtgaaggtctcctgcaaggcttctggaggcaccttcagcagctatactatcagctgggtgcgacaggcccctggacaagggcttgagtggatgggaaggatcatccctatccttggtatagcaaactacgcacagaagttccagggcagagtcacgattaccgcggacaaatccacgagcacagcctacatggagctgagcagcctgagatctgaggacacggccgtgtattactgtgcgagagcggaatgggattgtagtggtggtagctgcccgtggggccagggaaccctggtcaccgtctcctcag

SEQ ID NO: 291 - DNA, 373 bp, Artificial Sequence
  Description of Artificial Sequence: Synthetic polynucleotide
gaggtgcagctggtggagtctgggggaggcttggtccagcctggggggtccctgagactctcctgtgcagcctctggattcacctttagtagctattggatgagctgggtccgccaggctccagggaaggggctggagtgggtggccaacataaagcaagatggaagtgagaaatactatgtggactctgtgaagggccgattcaccatctccagagacaacgccaagaactcactgtatctgcaaatgaacagcctgagagccgaggacacggctgtgtattactgtgcgagagatggagggggtgaatatagtggctacgattatgcttttgatatctggggccaagggacaatggtcaccgtctcttcag

SEQ ID NO: 292 - DNA, 384 bp, Artificial Sequence
  Description of Artificial Sequence: Synthetic polynucleotide
caggtccagctggtacagtctggggctgaggtgaagaagcctggggcctcagtgagggtcccctgcaaggtttccggatatagaataactgaattatccatgcactgggtgcgacaggctcctggaaaagggcttgagtggatgggaggttttaatcctgaggatggtgagacaatctacgcacagcagttccagggcagagtctccatgaccgaagacacagctgcagacacagcctacatggagctgaccaggctgagatctgacgacacggccgtctattactgtgcaacaagtctagcagtggttggggaccgggggcactaccactactacttcggtatggacgtctggggccaagggaccacggtcaccgtctcctca

SEQ ID NO: 293 - DNA, 387 bp, Artificial Sequence
  Description of Artificial Sequence: Synthetic polynucleotide
caggtgcagctggtggagtctgggggaggcgtggtccagcctgggaggtccctgagactctcctgtgcagcctctggattcaccttcagtacctatgccatgcactgggtccgccaggctccaggcaaggggctggagtgggtggcagttatatcatatgatggaagtaataaatactatgcagactccatgaagggccgattcaccatctccagagacaattccaagaacacgctgtatctgcaaatgaacagcctgagagctgaggacacggctgtgtattactgtgcgaaaggagattacgatgtttggagtggttatcatcgagtctactactaccacggtatggacgtctggggccaagggaccacggtcaccgtctcctca

SEQ ID NO: 294 - DNA, 689 bp, Artificial Sequence
  Description of Artificial Sequence: Synthetic polynucleotide
caggtcaccttgaaggagtctggtcctgtgctggtgaaacccacagagaccctcacgctgacctgcaccgtctctgggttctcactcagcaatgctagaatgggtgtgagctggatccgtcagcccccagggaaggccctggagtggcttgcacacattttttcgtgggtgggctgcgtgcgccagcggaggaatgttcacagcagaagaggacaagtaagacatcagcagcaccgggggcttcccatacagtcacgagagggggcaagtacgcattcaggtgacagggtttgctcccttccaaggagttcatgcagcgcacaggtcccagggcagggtcacagaacaggccgtaaggccctcctctcagccaggaccaaggacagcagctccaccaagggcccatcggtcttccccctggcgccctgctccaagaacacctctgggggcacaacggcccaattctaatgacgaaaaatcctacagcacatctctgaagagcaggctcaccatctccaaggacacctccaaaagccaggtggtccttaccatgaccaacatggaccctgtggacacagccacatattactgtgcacgtacagtacgatattttgactggttattgcactcggattactacaactggttcgacccctggggccagggaaccctggtcaccgtctcctcag

SEQ ID NO: 295 - DNA, 385 bp, Artificial Sequence
  Description of Artificial Sequence: Synthetic polynucleotide
caggtgcagctggtgcagtctggggctgaggtgaagaagcctggggcctcagtgaaggtttcctgcaaggcatctggatacactttcaccagctactatatgcactgggtgcgacaggcccctggacaagggcttgagtggatgggaataatcaaccctagtggtggtagcacaagctacgcacagaagttccagggcagagtcaccatgaccagggacacgtccacgagcacagtctacatggagctgagcagcctgagatctgaggaaacggccgtgtattactgtgcgagagaccaccggaagcgcggcggtgactacggtggtaatatattcccgggctttgactactggggccagggaaccctggtcaccgtctcctcag

SEQ ID NO: 296 - DNA, 370 bp, Artificial Sequence
  Description of Artificial Sequence: Synthetic polynucleotide
caggtccagctggtacagtctggggctgaggtgaagaagcctggggcctcagtgaaggtctcctgcaaggtttccggatacaccctcattgaattatccatgcactgggtgcgacaggctcctggaaaagggcttgagtggatgggaggttttgatcctgaagatggtgaaacaatctacgcacagaagttccagggcagagtcaccatgaccgaggacacatctacagacacagcctacatggagctgagcagcctgacatctgaggacacggccgtgtattactgtgcaacaacaaccccttttggagtggttaacgccatctggttcgacccctggggccagggaaccctggtcaccgtctcctcag

SEQ ID NO: 297 - DNA, 388 bp, Artificial Sequence
  Description of Artificial Sequence: Synthetic polynucleotide
caggttcagctggtgcagtctggagctgaggtgaagaagcctggggcctcagtgacggtctcctgcaaggcttctggttacacctttaccagctttggtatcagctgggtgcgacaggcccctggacaggggcttgagtggatgggatggatcagaccttacagtggcaacacaaactatgcacagaaggtccagggcagagtcaccatgaccacagacacatccacgaccacagcctacatggagctgaggagcctgagatctgacgacacggccgtgtattactgtgcgagagatgggtattatgatagtagtggttataggttctattggcgtgacgatgcttttgatatctggggccaagggacaatggtcaccgtctcttcag

SEQ ID NO: 298 - DNA, 367 bp, Artificial Sequence
  Description of Artificial Sequence: Synthetic polynucleotide
caggtgcagctgcaggagtcgggcccaggactggtgaagccttcggggaccctgtccctcacctgcgctgtctctggtggctccatcagcagtactaactggtggagttgggtccgccagcccccagggaaggggctggagtggattggggaaatctatcatagtgggaacgccaactacaacccgtccctcaagagtcgagtcaccatatcagtagacaagtccgagaaccagttctccctgaagctgatctctgtgaccgccgcggacacggccgtgtattactgtgcgagaagatattgtagtggtggtacctgctccccctttgactactggggccagggaaccctggtcaccgtctcctcag

SEQ ID NO: 299 - DNA, 384 bp, Artificial Sequence
  Description of Artificial Sequence: Synthetic polynucleotide
caggtgcagctggtgcagtctggggctgaggtgaagaagcctgggtcctcggtgaaggtctcctgcaaggcttctggaggcaccttcagcagctatgctatcagctgggtgcgacaggcccctggacaagggcttgagtggatgggaggattcatccctatctttggtacagcaaactacgcacagaagttccagggcagagtcacgattaccgcggacgaatccacgagcacagtctacatggagctgagcagcctgagatctgaggacacggccgtgtattactgtgcgagaatccacacggacctagcagtggctgatcctgatttggggttctacagtatggacgtctggggccaagggaccacggtcaccgtctcctca

SEQ ID NO: 300 - DNA, 366 bp, Artificial Sequence
  Description of Artificial Sequence: Synthetic polynucleotide
caggtgcagctggtggagtctgggggaggcgtggtccagcctgggaggtccctgagactctcctgtgcagcctctggattcaccttcattaactatgctatgcactgggtccgccaggctccaggcaaggggctggagtgggtggcagttatatcatatgatggaagcaataaatactacgaagactccgtgaagggccgattcaccatctccagagacaattccaagaacacgctgtatctgcaaatgaacagcctgagacctgaggacacggctgtgtattactgtgcgagagatctagcatattgggatacggactacggtatggacgtctggggcctagggaccacggtcaccgtctcctca

SEQ ID NO: 301 - DNA, 358 bp, Artificial Sequence
  Description of Artificial Sequence: Synthetic polynucleotide
caggtgcagctggtggagtctgggggaggcgtggtccagcctgggaggtccctgagactctcctgtgcagcctctggattcaccttcagtagctatgctatgcactgggtccgccaggctccaggcaaggggctggagtgggtggcatttatctcatatgatggaagcaataaatactacgcagactccgtgaagggccgattcaccatctccagagacaattccaagaacactctgtatctgcaaatgaacagcctgggagctaaggacacggctgtgtattactgtgcgagccttatagcagcggctggtgggagggactactggggccagggaaccctggtcaccgtctcctcag

SEQ ID NO: 302 - DNA, 352 bp, Artificial Sequence
  Description of Artificial Sequence: Synthetic polynucleotide
gaggtgcagctggtggagtctgggggaggcttggtacagcctggggggtccctgagactctcctgtgctgcctctggattcaccttcagtagctatactatgaactgggtccgccaggctccagggaaggggctggagtgggtttcatacattagtagtagtgctggtaccatacactacgcagactctgtgaagggccgattcaccatctccagagacaatgccaagaactcactgtatctgcaaatgaacagcctgagagtcgaggacacggctgtgtattactgtgcgagagattcgggagccatctttgactcctggggccagggaaccctggtcaccgtctcctcag

SEQ ID NO: 303 - DNA, 384 bp, Artificial Sequence
  Description of Artificial Sequence: Synthetic polynucleotide
caggtccagctggtacagtctggggctgaagtgaagaagcctggggcctcagtgagggtcccctgcaaggtttccggatacagcataactgaattatccatccactgggtgcgacaggctcctggaaaagggcttgagtggatgggaggttttaatcctgaggaagctgaaacaatctacgcacagcagttccagggcagagtcaccatgaccgaggacacatctgcagacacagcctacatggagctgaccaggctgagatctgaggacacggccgtctattactgtgcaacagctctagcagtggcgggggaccgggggcattaccactactacttcggtatggacgtctggggccaagggaccacggtcaccgtctcctca

SEQ ID NO: 304 - DNA, 364 bp, Artificial Sequence
  Description of Artificial Sequence: Synthetic polynucleotide
caggtgcagctggtggagtctgggggaggcgtggtccagcctgggaggtccctgagactctcctgtgcaggctctggattcaccttcagtaggtatggcatgcactgggtccgccaggctccaggcaaggggctggagtgggtggcagttatatcatatgatggaagtaatacatactatggagactccgtgaagggccgattcaccatctccagagacaattccaagaacacgctgtatctgcaaatgaacagcctgagagttgaggacacggctgtgtattactgtgcgaaagaggtcgggtatagtgactacgatggctgggactactggggccagggaaccctggtcaccgtctcctcag

SEQ ID NO: 305 - DNA, 270 bp, Artificial Sequence
  Description of Artificial Sequence: Synthetic polynucleotide
caggtgcagctggtggagtctgggggagtgcagctatatcatatgatgaaatcataaaatactacgaagactccgtgaagggccgattcaccatgtccaaagacaattccaagaacaccctgtatctgcaaatgaacatcctgatatctgatgacacggctgtgtattactgtgcgagagacatggtctttggatagagtctatggttggacttactactactacggtatggacgtctggggccaagggaccacggtcaccgtctcctca

SEQ ID NO: 306 - DNA, 379 bp, Artificial Sequence
  Description of Artificial Sequence: Synthetic polynucleotide
cagatcaccttgaaggagtctggtcctacgctggtgaaacccacacagaccctcacgctgacctgcaccttctctgggttctcactcagcactagtggagtgggtgtgggctggatccgtcagcccccaggaaaggccctggagtggcttgcactcatttattgggatgatgataagcgctacagcccatctctgaagagcaggctcaccatcaccaaggacacctccaaaaaccaggtggtccttacaatgaccaacatggaccctgtggacacagccacatattactgtgcacacaggagcggtgaattactatggttcaggggggaagactggttcgacccctggggccagggaaccctggtcaccgtctcctcag

SEQ ID NO: 307 - DNA, 376 bp, Artificial Sequence
  Description of Artificial Sequence: Synthetic polynucleotide
gaagtgcagctggtgcagtctggagcagaggtgaaaaagcccggggagtctctgaggatctcctgtaagggttctggatacagctttaccagctactggatcagctgggtgcgccagatgcccgggaaaggcctggagtggatggggaggattgatcctagtgactcttataccaactacagcccgtccttccaaggccacgtcaccatctcagctgacaagtccatcagcactgcctacctgcagtggagcagcctgaaggcctcggacaccgccatgtattactgtgcgagactagtaaggggatgtagtggtggtagctgctattcggtcgatgactactggggccagggaaccctggtcaccgtctcctcag

SEQ ID NO: 308 - DNA, 364 bp, Artificial Sequence
  Description of Artificial Sequence: Synthetic polynucleotide
caggtgcagctggtggagtctgggggaggcgtggtccagcctgggaggtccctgagactctcctgtgcagcctctggattcaccttcagtacctatgctatgcactgggtccgccaggctccaggcaaggggctggagtgggtggcagttatatcatatgatggaagcaataaatactacgcagtctccgtgaagggccgattcaccatctccagagacaattccaagaacacgctgtatctgcaaatgaacagcctgagagctgaggacacggctgtgtattactgtgcgaggacccatggtgggaactacgggaggtactttgactactggggccagggaaccctggtcaccgtctcctcag

SEQ ID NO: 309 - DNA, 367 bp, Artificial Sequence
  Description of Artificial Sequence: Synthetic polynucleotide
caggtccagctggtgcagtctggggctgaggtgaagaagcctgggtcctcggtgaaggtctcctgcaaggcttctggaggcaccttcagcagctatgctatcacctgggtgcgacaggcccctggacaagggcttgagtggatgggagggatcatccctatctttggtacagcaaactacgcacagaagttccagggcagagtcacgattaccgcggacgaatccacgagcacagcctacatggagctgagcagcctgagatctgaggacacggccgtgtattactgtgcgagagtcgagtcctatgataatagtggttattattttgactactggggccagggaaccctggtcaccgtctcctcag

SEQ ID NO: 310 - DNA, 364 bp, Artificial Sequence
  Description of Artificial Sequence: Synthetic polynucleotide
caggtgcagctggtgcagtctggggctgaggtgaagaagcctggggcctcagtgaaggtttcctgcaaggcatctggatacaccttcagcagcttctacatgaattgggtacgacaggcccctggacaagggcttgagtggatgggaataatcaatcctgatggtggtggcacagtctactcacagaagatccaggacagactcaccatgaccagggacacgtccacgagcacattttatttggaggttagcggcctgagatctgaggacacggccgtatattactgtgcgagaggccgttcggactttttattacaaaactttgactactggggccagggaaccccggtcaccgtctcctcag

SEQ ID NO: 311 - DNA, 346 bp, Artificial Sequence
  Description of Artificial Sequence: Synthetic polynucleotide
caggtgcagctgcaggagtcgggcccaggactggtgaagccttcggagaccctgtccctcacctgcactgtctctggtggctccatcagtagttactactggagctggatccggcagcccccagggaagggactggagtggattgggtatatctattacagtgggagcaccaactacaacccctccctcaagagtcgagtcaccatatcagtagacacgtccaagaaccagttctccctgaaggtgaggtctgtgaccgctgcggacacggccgtgtattactgtgcgagagtagttcgctggttcgacccctggggccagggaaccctggtcaccgtctcctcag

SEQ ID NO: 312 - DNA, 367 bp, Artificial Sequence
  Description of Artificial Sequence: Synthetic polynucleotide
caggtgcagctggtgcagtctgggactgaggtgaagaagcctggggcctcagtgaaggtttcctgcaagacatctggatacatattcaccaactactatatccactgggtgcgacaggcccctggacaagggcttgagtggatgggcatattcaaccctaatggtggcggcacaagctacgcacagaagttccagggcagaatcaccttgaccggctacacgtccgcgaacataggctatatggaactgaggagcctgacatctgaggacacggccgtttattattgtgcgagagatccacgcagttcgggtgacaatgatggttttgatatgtggggccaggggacaaaggtcaccgtctcttcag

SEQ ID NO: 313 - DNA, 364 bp, Artificial Sequence
  Description of Artificial Sequence: Synthetic polynucleotide
caggtgcagctggtggagtctgggggaggcgtggtccagcctgggaggtccctgagactctcctgtgcagcctctggattcaccttcaataactatgctatgcactgggtccgccaggctccaggcaaggggctggagtgggtggcagttatatcatatgatggaagcaataaatactacgcagactccgtgaagggccgattcaccatctccagagacaattccaagaacacgctgtctctgcaagtgaacagcctgagagctgaggacacggctctgtattactgtgcgagagaccgtagtgggagctactttggcccgtttgactactggggccagggaaccctggtcaccgtctcctcag

SEQ ID NO: 314 - DNA, 346 bp, Artificial Sequence
  Description of Artificial Sequence: Synthetic polynucleotide
gaggtgcagctggtggagtctggaggaggcttgatccagcctggtgggtccctgagactctcctgcgcagcctctgggttcaccgtcagtagtaactacatgagctgggtccgccaggctccaggggaggggctggagtgggtctcaattatttatagcggtggtcccacatactacgcagactccgtgaagggccgattcaccatctccagagacaattccaagaacacgctgtatcttcaaatgagcagcctgagagccgaggacacggccatgtattactgtgcgacaggccggtatgatagtattcactggggtcagggaaccctggtcaccgtctcctcag

SEQ ID NO: 315 - DNA, 364 bp, Artificial Sequence
  Description of Artificial Sequence: Synthetic polynucleotide
caggtgcagctggtggagtctgggggaggcgtggtccagcctgggaggtccctgagactctcctgtgcagcctctggattcaccttcagtacctatgctatgcactgggtccgccaggctccaggcaaggggctgtattgggtggcagttatatcatatgatggaatcaataaatactacgcagactccgtgaagggccgattcaccatctccagagacaattccaagaacacactgtatctgcaaatgaacagcctgagagctgaggacacggctgtgtattactgtgcgagatcgggcagtgggagctacttcaactggttcgacccctggggccagggaaccctggtcaccgtctcctcag

SEQ ID NO: 316 - DNA, 364 bp, Artificial Sequence
  Description of Artificial Sequence: Synthetic polynucleotide
caggtgcagctggtgcagtctggggctgaggtgaagaagcctggggcctcagtgatggtctcctgcaaggcttctggatacaccttcaccgactactatatgcactgggtgcgacaggcccctggacaagggcttgagtggatgggacggatcaaccctagcagtggtggcacaaactatgcacagaagtttcagggcagggtcaccatgaccagggacacgtccatcagcacagcctacatggagctgagcaggctgagatctgacgacacggccgtgtattactgtgcgagagatagcagcagctggaggtacaattggttcgacccctggggccagggaaccctggtcaccgtctcctcag

SEQ ID NO: 317 - DNA, 363 bp, Artificial Sequence
  Description of Artificial Sequence: Synthetic polynucleotide
caggtgcagctggtggagtctgggggaggcgtggtccagcctgggaggtccctgagactctcctgtgcagcctctggattcaccttcagtagctatgctatgcactgggtccgccaggctccaggcaaggggctggagtgggtggcaattatatcatatgatggaagcaataaatactacgcagactccgtgaagggccgattcgccatctccagagaaaattccaagaacacgctgtatctgcaaatgaacagcctgagagctgaggacacggctgtgtactactgtgcgagagcttatagtggaggatattactacggtatggacgtctggggccaagggaccacggtcgccgtctcctca

SEQ ID NO: 318 - DNA, 390 bp, Artificial Sequence
  Description of Artificial Sequence: Synthetic polynucleotide
caggtgcagctgcaggagtcgggcccaggactggtgaagccttcacagaccctgtccctcacctgcactgtctctggtggctccatcagcagtggtggttactactggagctggatccgccagcacccagggaagggcctggagtggattgggtacatctattacagtgggagcacctactacaacccgtccctcaagagtcgagttaccatatcagttgacacgtctaagaaccagttctccctgaggctgagctctgtgactgccgcggacacggccatttattactgtgcgacagagagtttacattacgatattttgactggttattcccccaccaactacggtatggacgtctggggccaagggaccacggtcaccgtctcctca

SEQ ID NO: 319 - DNA, 364 bp, Artificial Sequence
  Description of Artificial Sequence: Synthetic polynucleotide
caggtgcagctggtgcagtctggggctgaggtgaagaagcctggggcctcagtgaaggtttcctgcaaggcatctggatacaccttcagcagcttctacatgaattgggtacgacaggcccctggacaagggcttgagtggatgggaataatcaatcctgatggtggtggcacagtctactcacagaagatccaggacagactcaccatgaccagggacacgtccacgagcacattttatttggagctgagcggcctgggatctgaggacacggccgtatattactgtgcgagaggccgttcggactttttattacaaaactttgactactggggccagggaaccccggtcaccgtctcctcag

SEQ ID NO: 320 - DNA, 363 bp, Artificial Sequence
  Description of Artificial Sequence: Synthetic polynucleotide
caggtgcagctggtggagtctgggggaggcgtggtccagcctgggaggtccctgagactctcctgtgcagcctctggattcaccttcagtacctatgctatgcactgggtccgccaggctccaggcaaggggctggagtgggtggcacttatatcatatgatggaagcaataaatactacgcagactccgtgaagggccgattcaccatctccagagacaattccaagaacacgctgtatctccaaatgaacagccttagagctgacgacacggctctgtattactgtgcgagagcaactagggggagctactattacggtatggacgtctggggccaagggaccacggtcaccgtctcctca

SEQ ID NO: 321 - DNA, 364 bp, Artificial Sequence
  Description of Artificial Sequence: Synthetic polynucleotide
caggtgcagctggtggagtctgggggaggcgtggtccagcctgggaggtccctgagactctcctgtgcagcctctggattcaccttcagtagctttgctctgcactgggtccgccaggctccaggcaaggggctggagtgggtggcagttatatcatatgatggaagcaataaatactacgcagactccgtgaagggccgattcaccatctccagagacaattccaagaacacgctgtatctgcaaatgaacagcctgagagctgaggacacggctgtgtattactgtgcgaaatcccggggggggaactactttgatgcttttgatatctggggccaagggacaatggtcaccgtctcttcag

SEQ ID NO: 322 - DNA, 364 bp, Artificial Sequence
  Description of Artificial Sequence: Synthetic polynucleotide
caggtgcagctggtggagtctgggggaggcgtggtccagcctgggaggtccctgagactctcatgtgcagcctctggattcaccttcagtagctatgctatgcactgggtccgccaggctccaggcaaggggctggagtgggtggcagttatatcatatgatggaatcaataaatactacgcagattccgtgaagggccgattcaccatctccagagacaattccaagaacacgctgtatctgcgaatgaacagcctgcgagctgaggacacggctgtctattactgtgcgagggtttttggtgggagctacttaggtgcttttgatgtctggggccaagggacaaaggtcaccgtctcttcag

SEQ ID NO: 323 - DNA, 364 bp, Artificial Sequence
  Description of Artificial Sequence: Synthetic polynucleotide
caggtccagctggtgcagtctggggctgaggtgaagaagcctgggtcctcggtgaaggtctcctgcaaggcttctggaggcaccttcaacaggaatgctatcaactgggtgcgacaggcccctggacaagggcttgagtggatgggaaggatcatccctatctttggaataacacactacgcacagaaattccagggcagagtcgcgattaccgcggacaaatccacaaacacagcctacatggagctgagcagcctgagatctgaggacacggccgtgtattactgtgcgagatcattttgtagtagtggtgcctgctactttgactactggggccagggaaccttggtcaccgtctcctcag

SEQ ID NO: 324 - DNA, 364 bp, Artificial Sequence
  Description of Artificial Sequence: Synthetic polynucleotide
caggtgcagctggtgcagtctggggctgaggtgaagaagcctggggcctcagtgaaggtttcctgcaaggcatctggatacaccttcagcagcttctacatgaattgggtacgacaggcccctggacaagggcttgagtggatgggaataatcaatcctgatggtggtggcacagtctactcacagaagatccaggacagactcaccatgaccagggacacgtccacgagcacattttatttggaagttagcggcctgagatctgaggacacggccgtatattactgtgcgagaggccgttcggactttttattacaaaactttgactactggggccagggaaccccggtcaccgtctcctcag

SEQ ID NO: 325 - DNA, 363 bp, Artificial Sequence
  Description of Artificial Sequence: Synthetic polynucleotide
caggtgcagctggtggagtctgggggaggcgtggtccagcctgggaggtccctgagactctcctgtgcagcctctggattcaccttcagtagctatgctatgcactgggtccgccaggctccaggcaaggggctggagtgggtggcaattatatcatatgatggaaccaataaatactacccagactccgtgaagggccgattcaccatctccagagacaattccaagaacacgctgtatctgcaaatgaacagcctgagagctgaggacacggctgtctattactgtgcgagagcgaatggtgggaactactactacggtatggacgtctggggccaagggaccacggtcaccgtctcctca

SEQ ID NO: 326 - DNA, 361 bp, Artificial Sequence
  Description of Artificial Sequence: Synthetic polynucleotide
caggtgcagctggtggagtctgggggaggcgtggtccagcctgggaggtccctgagactctcctgtgcagcctctggattcatcttcagtacctatgctatgcactgggtccgccaggctccaggcaaggggctggagtgggtggcagttatatcatatgatggaagcaataaatactacgcagactccgtgaagggccgattcaccatctccagagacaattccaagaacacgctgtatctgcaaatgaacagcctgagtgctgaggacacggctgtgtattactgtgcgagaggcggtgggaactacagggagccttttgactactggggccagggaaccctggtcaccgtctcctcag

SEQ ID NO: 327 - DNA, 364 bp, Artificial Sequence
  Description of Artificial Sequence: Synthetic polynucleotide
caggtgcagctggtggagtctgggggagacgtggtccagcctaggaggtcactgagactctcctgtgcagcctctgggttcaccttcagtagctatgctatgcactgggtccgccaggctccaggcaaggggctggagtgggtggcagttatttcatatgatggaatcaataaatactacgcagactccgtgaggggccaattcgccatctccagagacaattccaagagcacgctgtatctgcaaatgaacagcctgagagctgaggacacggctgtgtattactgtgcgagaccacggctcgggaattacttcgatgcttttgatatctggggcctagggacaatggtcaccgtctcttcag

SEQ ID NO: 328 - DNA, 375 bp, Artificial Sequence
  Description of Artificial Sequence: Synthetic polynucleotide
cagctgcagctgcaggagtcgggcccaggactggtgaagccttcggagaccctgtccctcacctgcactgtctctggtggctccatcagcagtagtagttactactggggatggatccgccagcccccagggaaggggctggagtggattgggagtatctattatagtgggagcacctactacaacccgtccctcaagagtcgagtcaccatatccgtagacacgtccaagaaccaattctccctgaagctgacctctgtgaccgccgcagacacggctctttattattgtgcgggcgaatccactgacaataattactactactactacgctatggacgtctggggccaagggaccacggtcaccgtctcctca

SEQ ID NO: 329 - DNA, 364 bp, Artificial Sequence
  Description of Artificial Sequence: Synthetic polynucleotide
caggtgcagctggtggagtctgggggaggcgtggtccagcctgggaggtccctgagactctcctgtgcagcctctggattcaccttcagtagctatgctatgcactgggtccgccaggctccaggcaaggggctggagtgggtggcagttatatcatatgatggaaacaataaatactacgcagactccgtgaagggccgattcaccttctccagagacaactccaagaacacgctgtatctgcaaatgagcagcctgagagctgaggacacggctgtctattactgtgcgagagcccgagggggtggctacaaccggctttttgactactggggccagggaaccctggtcaccgtctcctcag

SEQ ID NO: 330 - DNA, 363 bp, Artificial Sequence
  Description of Artificial Sequence: Synthetic polynucleotide
caggtgcagctggtggagtctgggggaggcgtggtccagcctgggaggtccctgagcctctcctgtgcagcctctggattcaccttcagtagctatgctatgcactgggtccgccaggctccaggcaaggggctggagtgggtggcacttatatcatatgatggaaacaataaatactacgcagactccatgaagggccgattcaccatctccagagacaattccaagaaaacgctgtatctgcaactgaacagcctgagagctgaggacacggctgtatattactgtgcgagcacattcggcggggcctactcctacggtatggacgtctggggccaagggaccacggtcaccgtctcctca

SEQ ID NO: 331 - DNA, 363 bp, Artificial Sequence
  Description of Artificial Sequence: Synthetic polynucleotide
caggtgcagctggtggagtctgggggaggcgtggtccagcctgggaggtccctgagactctcctgtgcagcctctggattcaccttcagtagctatgctatgcactgggtccgccaggctccaggcaaggggctggagtgggtggcagttatatcatatgatggaagcaataaatactacccagactccgtgaagggccgattcaccatctccagagacaattccaagaacacgctgtatctgcaaatgaacagcctgagagctgaggacacggctgtgtattactgtgcgagagcgaggggtggtaactactactacggtatggacgtctggggccaagggaccacggtcaccgtctcctca

SEQ ID NO: 332 - DNA, 364 bp, Artificial Sequence
  Description of Artificial Sequence: Synthetic polynucleotide
caggtgcagctggtggagtctgggggaggcgtggtccagcctgggaggtccctgagactctcctgtgcagcctctggattcaccttcagtacctatgctatacactgggtccgccaggctccaggcaaggggctggagtgggtggcagttatatcatatgatggaagcaataaatactacgcagactccgtgaagggccgcttcaccatctccagagacaattccaagaacacgctgtatctacaaatgaatagcctgacaactgaggacacggctgtgtattactgtgcgagagatagagagggggcttactggggccccatagactactggggccagggaaccctggtcaccgtctcctcag

SEQ ID NO: 333 - DNA, 364 bp, Artificial Sequence
  Description of Artificial Sequence: Synthetic polynucleotide
caggtgcagctggtggagtctgggggaggcgtggtccagcctgggaggtccctgagactctcctgtgcagcgtctggattcaccttcagtaactatggcatgcactgggtccgccaggctccaggcaaggggctggagtgggtggcagttatatggtatgatggaagtaataaatactatgcagactccgtgaagggccgattcaccatctccagagacaattccaagaatacgctgtatctgcaaatgaacagcctgagagtcgaggacacggctatgtatttctgtacgaccgatattccggccctgacagaaaacccctttgactactggggccagggaaccctggtcaccgtctcctcag

SEQ ID NO: 334 - DNA, 364 bp, Artificial Sequence
  Description of Artificial Sequence: Synthetic polynucleotide
caggtgcagctggtggagtctgggggaggcgtggtccagcctgggaggtccctgagactctcctgtgtagcctctggattcaccttccgtagctatgctatgcactgggtccgccaggctccaggcaaggggctggagtgggtgacagtgatatcatatgatggaaacaatcaatactacgcagactccgtgaagggccgattcaccatctccagagacaattccaagaacacgctgtatctgcaaatgaacagcctgagagctgaggacacggctgtgtattattgtgcgaggccccggggggggaactacgtgggaccctttgactactggggccagggaaccctggtcaccgtctcctcag

SEQ ID NO: 335 - DNA, 346 bp, Artificial Sequence
  Description of Artificial Sequence: Synthetic polynucleotide
gaggtgcagctggtggagtctggaggaggcttgatccagcctggtgggtccctgagactctcctgtgcagcctctgggttcaccgtcagtagtaactacatgagctgggtccgccaggctccaggggaggggctggagtgggtctcaattatttatagcggtggtcccacatactacgcagactccgtgaagggccgattcaccatctccagagacaattccaagaacacgctgtatcttcaaatgaacagcctgagagccgaggacacggccatgtattactgtgcgacaggccggtatgatagtattcactggggtcagggaaccctggtcaccgtctcctcag

SEQ ID NO: 336 - DNA, 364 bp, Artificial Sequence
  Description of Artificial Sequence: Synthetic polynucleotide
caggtgcagctggtggagtctgggggaggcgtggtccaccctgggaggtccctgagactctcctgtgcagcctctggattcaccttcagtagctatgctatgtactgggtccgccaggctccaggcaaggggctggagtgggtggcagttatatcatatgatggaagcaataaatactacgcagactccgtgaagggccgattcaccatctccagagacaattccgagaacacgctgtatctgcaaatgaacagtctgagagctgaggacacggctgtgtattactgtgcgagaccagagagtgggagctacttgggtcactttgactcctggggccagggaaccctggtcaccgtctcctcag

SEQ ID NO: 337 - DNA, 360 bp, Artificial Sequence
  Description of Artificial Sequence: Synthetic polynucleotide
caggtgcagctggtggagtctgggggaggcgtggtccagcctgggaggtccctgagactctcctgtgcagcctctggattcaccttcagtagctttgctatgcactgggtccgccaggctccaggcaaggggctggagtgggtggcagttatatcatatgatggaagcaataaatactacgcagactccgtgaagggccgattcaccatctccagagacaattccaagaacacgctgtttctgcaaatgaacagcctgagagatgaggacacggatgtatattactgtgcgaggggttttggagggaactactacgggatggacgtctggggccaagggactacggtcaccgtctcctca

SEQ ID NO: 338 - DNA, 364 bp, Artificial Sequence
  Description of Artificial Sequence: Synthetic polynucleotide
caggtgcagctggtggagtctgggggaggcgtggtccagcctgggaggtccctgagactctcctgtgcagcctctggattcaccttcagtacctatgctatgcactgggtccgccaggctccaggcaaggggctggagtgggtggcagttatatcatatgatggaagcaataaatactacgcagactccgtgaagggccgattcaccatctccagagacaattccaagaacacgctgtatctgcaaatgaacagcctgagagctgaggacacggctgtgtattactgtgcgaaatctcctccggcgagttattatacctggttccacccctggggccacggaagcctggtcaccgtctccacaa

SEQ ID NO: 339 - DNA, 358 bp, Artificial Sequence
  Description of Artificial Sequence: Synthetic polynucleotide
caggtgcagctggtggagtctgggggaggcgtggtccagcctgggaggtccctgagactctcctgtgcagcctctggattcaccttcagtacctattctatgcactgggtccgccaggctccaggcaaggggctgcagtgggtgacacttatatcatatgatggaatcaatacatactacgcagactccgtgaagggccgattcaccatctccagagacaattccaagaacacgctgtatctgcacatgaacagcctgagagctgaggacacggctgtctattactgtgcgagaaccgatggctacaaccaggcttttgatatctggggccaagggacattggtcaccgtctcttcag

SEQ ID NO: 340 - DNA, 367 bp, Artificial Sequence
  Description of Artificial Sequence: Synthetic polynucleotide
caggtgcagctggtgcagtctggggctgaggtgaagaagcctggggcctcagtgaaggtctcctgcaggacatctggatacaccttcagcacctactatctccactgggtgcgacaggcccctggacaggggtttgaatggatgggaataatcaaccctagtggtggtggcacaagttacgcaccgaacttcgagggcagagtcaccatgaccatggatacattcacgagcacagtgttcttggagctgagcagcctgacatctgaggacacggccgtgtattattgtgcgagagatggtccagttcttgactggttgtttgtgtttgactattggggccagggaaccctggtcaccgtctcctcag

SEQ ID NO: 341 - DNA, 364 bp, Artificial Sequence
  Description of Artificial Sequence: Synthetic polynucleotide
caggtgcagctggtggagtctgggggaggcgtggtccagcctgggaggtccctgagactctcctgtgcagcctctggattcaccttcagtagctttggcatccactgggtccgccaggctccaggcaaggggctggagtgggtggcacttatatcatatgatggaattaataagtactatgcagactccgtgaagggccgattcaccctctccagagacaattccaagaacacgttgtatctgcaaatgaacagcctgagacctgaggacacggctgtgtattactgtgcgaaaaccatttgggggacttatcgctccccctttgactactggggccagggaaccctggtcaccgtctcctcag

SEQ ID NO: 342 - DNA, 378 bp, Artificial Sequence
  Description of Artificial Sequence: Synthetic polynucleotide
caggtccagcttgtgcagtctggggctgaggtgaagaagcctggggcctcagcgaagatttcctgcaaggcttctggattctccttcaccacttatactatacagtgggtgcgccaggcccccggacaaagccttgagtggatgggctggatcgacactggcaacggtaacacagaatattcacagaagttccagggcagaatcaccatcaccagggacgcttccgcgagggcagcctacatggagctgagcagcctgacatctgaagacacggctgtctattattgtgcgagagatctctcccccaaggattttttgggttcctccttgggcggcagggacgtctggggccaagggaccacggtcaccgtctcctca

SEQ ID NO: 343 - DNA, 358 bp, Artificial Sequence
  Description of Artificial Sequence: Synthetic polynucleotide
caggtgcagctggtggagtctgggggaggcgtggtccagcctgggaggtccctgagactctcctgtgcagcctctggattcaccttcaatacctatgctatacactgggtccgccaggctccaggcaaggggctggagtgggtggcagttatatcatatgatggaagcaataaatactacgcagactccgtgaagggccgattcaccatctccagagacaattccaagaacacgctgtatctgcaaatgaacagcctgagagctgaggacacggctgtgtattactgtgcgagagattcaaggggctacggacactttgactactggggccagggaaccctggtcaccgtctcctcag

SEQ ID NO: 344 - DNA, 394 bp, Artificial Sequence
  Description of Artificial Sequence: Synthetic polynucleotide
caggtgcagctggtggagtctgggggaggcgtggtccagcctgggaggtccctgagactctcctgtgcagcgtctggattcaccttcagtagctatggcatgcactgggtccgccaggctccaggcaaggggctggagtgggtggcagttatatggtatgatggaagtaataaatactatgcagactccgtgaagggccgattcaccatctccagagacaattccaagaacacgctgtatctgcaaatgaacagcctgagagccgaggacacggctgtgtattactgtgcgaggggaccccaggagcagtacgatattttgactggttattactttcccgcaaactggtacttcgatctctggggccgtggcaccctggtcactgtctcctcag

SEQ ID NO: 345 - DNA, 358 bp, Artificial Sequence
  Description of Artificial Sequence: Synthetic polynucleotide
caggtgcagctggtggagtctgggggaggcgtggtccagcctgggaggtccctgagactctcctgtgcagcctctggattcaccttcagtacctatgctatgcactgggtccgccaggctccaggcaaggggctggagtgtgtggcatttatatcatatgatggaagcaataaatactacgcagactccgtgaagggccgattcaccatctccagagacaattccaagaacacgctgtatctgcaaatgaacagcctgagagctgaggacacggctgtgtattactgtgcgagatctctggctgcctactggtactttgactactggggccagggaaccctggtcaccgtctcctcag

SEQ ID NO: 346 - DNA, 358 bp, Artificial Sequence
  Description of Artificial Sequence: Synthetic polynucleotide
gaggtgcagctggtggagtctgggggaggcttggtccagcctggggggtccctgagactctcctgtgcagcctctggattcacctttagtttctattggatgagctgggtccgccaggctccagggaaggggctggagtgggtggccaacataaagcaagatggaggtgagaaatactatgtggactctgtgaagggccgattcaccatctccagagacaacgccaagaactcactgtatctgcaaatgaacagcctgagagccgaggacacggctgtgtatttctgtgcgagattggggggcagcagctggtactgggactactggggccagggaaccttggtcaccgtctcctcag

SEQ ID NO: 347 - DNA, 376 bp, Artificial Sequence
  Description of Artificial Sequence: Synthetic polynucleotide
gaggtgcagctgttggagtctgggggaggcttggtacagcctggggggtccctgagactctcctgtgcagcctctggattcacctttagcagctatgccatgagctgggtccgccaggctccagggaaggggctggagtgggtctcagctattagtggtagtggtggtagcacatacttcgcagactccgtgaagggccggttcaccatctccagagacaattccaagaacactctgtatctgcaaatgaacagcctgagagccgaggacacggccttatattactgtgcgaaaggagttcatgggaccagtggctggtacccaccgagggcctttgactactggggccagggaaccctggtcaccgtctcctcag

SEQ ID NO: 348 - DNA, 373 bp, Artificial Sequence
  Description of Artificial Sequence: Synthetic polynucleotide
caggtgcagctgcaggagtcgggcccaggactggtgaagccttcacagaccctgtctctcacctgcactgtctccggtggctccattaggactggtggatcctactggacctggatgcgccagcgcccagggaagggcctggagtggcttgggtatgtcttttacagtgggagcacctactacaacccctccctcaagagtcgagttatcatgtcagtagacacatctaataatcagttctccctgaggctgacctctgtgactgccgcggacacggccgtgtatttctggtcaaaagaccaagggcccgtttttggagtggataactggttcgacccctggggccagggaaccctggtcaccgtctcttcag

SEQ ID NO: 349 - DNA, 361 bp, Artificial Sequence
  Description of Artificial Sequence: Synthetic polynucleotide
gaggtgcagctggtggagtctgggggaggcttggtacagcctggggggtccctgagactctcctgtgcagcctctggattcaccttcagtacctataatatgaactgggtccgccaggctccagggaaggggctggagtgggtttcatacattagtagtagtagtagtagtatatactacgcagactctgtgaagggccgattcaccatctccagagacaatgccaagaactcactgtatctgcaaatgaacagcctgagagacgaggacacggctgtgtattactgtgcgagagatgggcccacggtgactcactactttgactactggggccagggaaccctggtcaccgtctcctcag

SEQ ID NO: 350 - DNA, 361 bp, Artificial Sequence
  Description of Artificial Sequence: Synthetic polynucleotide
gaggtgcagctggtgcagtctggactagagctgaagaagcccggtgagtctctgaagatctcgtgtaagacttctggatacagctttaccactcattggatcggctgggtgcgccagatgcccgggaaaggcctggagtggatgggaatcatctttcctggtgactctgagaccagatatggcccgtccgtccaaggccaggtcaccatctcagtcgacaattccatcactactacctacgtacagtggactaccctgaaaccctcggacaccgccatgtacttctgtgcgagacgagggaatggcggctatgatgcctttgatgtctggggccaagggacaatgctcatcgtctcttcag

SEQ ID NO: 351 - DNA, 364 bp, Artificial Sequence
  Description of Artificial Sequence: Synthetic polynucleotide
caggtgcagctggtggagtctgggggaggcgtggtccagcctgggaggtccctgagactctcctgtgcagcgtctggattcatattcagtacctatggcatgcactgggtccgccaggctccaggcaaggggctggagtgggtggcagttatatggtatgatggaagtaataaatactatgcagactccgtgaagggccgattctccatctccagagacaattccaagaacacactgtttctgcaaatgaacagcctgagagccgaggacacggctgtgtattactgtgcgagagattatcaggtcggcggtgactacagatctgacttctggggccagggaaccctggtcaccgtctcctcag

SEQ ID NO: 352 - DNA, 352 bp, Artificial Sequence
  Description of Artificial Sequence: Synthetic polynucleotide
caggtgcagctgcaggagtcgggcgcaggactggtaaagccttcggagaccctgtcgctcacctgcactgtctctggtggctccatcagtggaaacttctggagttgggtccggcagtccccagggaggggactggagtggattggctatgtctattatactggtgtcaccaattatagcccctccctcaagagtcgagtcaccatatcagttgacacgtccaggaagcagttctccctgaacctcacctctgtgaccgctgcggacacggccgtctattactgtgcgagagaggtccgatggaactggttcgacacctggggccagggaacccgggtcaccgtctcctcag

SEQ ID NO: 353 - DNA, 381 bp, Artificial Sequence
  Description of Artificial Sequence: Synthetic polynucleotide
gaggtgcagctggtggagtctggaggaggcttgatccagcctggggggtccctgagactctcctgtgtagcctctgggttcaccgtcagtagcaactacatgagctgggtccgccaggctccagggaaggggctggagtggatctcagtcatttatagcggtggtaccacattctacgcagactccgtgaagggccgattcaccatctccagagacaattccaagaacacgctgtatcttcaaatgaacagcctgagagccgacgacacggccgtgtattactgtgcgagagatcggaggattactatggttcggggagttatctactactactacggtatggacgtctggggccaagggaccacggtcaccgtctcctca

SEQ ID NO: 354 - DNA, 364 bp, Artificial Sequence
  Description of Artificial Sequence: Synthetic polynucleotide
caggtgcagctggtggagtctgggggaggcgtggtccagcctgggaggtccctgagactctcctgtgcagcgtctggattcaccttcagtaactatggcatgcactgggtccgccaggctccaggcaaggggctggagtgggtggcagttatatggtatgatggaagtaataaatactatgcagactccgtgaagggccgattcaccatctccagagacaattccgagaacacggtgtatctgcaaatgaacagcctgagagccgaggacacggctgtgtattactgtgcgagagatgggatggtgggagctactaccgggattgactactggggccagggaaccctgatcaccgtctcctcag

SEQ ID NO: 355 - DNA, 370 bp, Artificial Sequence
  Description of Artificial Sequence: Synthetic polynucleotide
caggtgcagctggtggagtctgggggaggcgtggtccagcctgggaggtccctgagactctcctgtgcagcctctggattcatcttcagtagctatggcatgcactgggtccgccaggctccaggcaaggggctggagtgggtggcagttatatcatatgatggaagtaatacatactatgcagactccgtgaagggccgattcaccatctccagagacaattccaagaacacgctgtatctgcaaatgaacagcctgagagctgaggacacggctgtgtattactgtgcgaaagatacgtcagtagtggtgattcctattttcttgtttgactactggggccagggaaccctggtcaccgtctcctcag

SEQ ID NO: 356 - DNA, 355 bp, Artificial Sequence
  Description of Artificial Sequence: Synthetic polynucleotide
caggtgcagctggtgcagtctggggctgaggtgaagaagcctggggcctcagtgaaggtttcctgcaaggcatctggatacaccttcaccaggtactttatccactgggtgcgacaggcccctggacaagggcttgagtggatgggaataatcaaccctagtggtggtagcacaagctacgcacagaagttccagggcagagtcaccatgaccagggacacgtccacgagcacagtctacatggagctgaacagcctgagatctgaggacacggccgtgtattactgtgcgatattggtggtgtatggtatgagggactactggggccagggatccctggtcaccgtctcctcag

SEQ ID NO: 357 - DNA, 352 bp, Artificial Sequence
  Description of Artificial Sequence: Synthetic polynucleotide
caggtgcagctgcaggagtcgggcgcaggactggtaaagccttcggagaccctgtcgctcacctgcactgtctctggtggctccatcagtggtaacttctggagttgggtccggcagtccccagggaggggactggagtggattggctatgtctattatactggtgtcaccaattatagcccctccctcaagagtcgagtcaccatatcagttgacacgtccaggaatcagttctccctgaacctcacctctgtgaccgctgcggacacggccgtctattactgtgcgagagaggtccgatggaactggttcgacacctggggccagggaacccgggtcaccgtctcctcag

SEQ ID NO: 358 - DNA, 367 bp, Artificial Sequence
  Description of Artificial Sequence: Synthetic polynucleotide
caggtccagctggtgcagtctggggctgaaatgaagaagcctgggtcctcggtgaaggtctcctgcaaggcttctggaggcaccttcagcagctatgctatcagctgggtgcgacaggcccctggacaagggcttgagtggatgggaaggatcatccctttctttggtatagcaaactccgcacagaagttccagggcagagtcacgattaccgcggacaaatccacgagcacagcctacatggagctgagcagcctgagatctgaggacacggccgtgtattactgtgcgagagtcccgccctccaccgggtacgacttctactttgactactggggccagggaaccctggtcaccgtctcctcag

SEQ ID NO: 359 - DNA, 367 bp, Artificial Sequence
  Description of Artificial Sequence: Synthetic polynucleotide
caggtgcagctggtggagtctgggggaggcgtggtccggcctgggaggtccctgagaatctcctgtgtagcctctggattcaccttcagtagttatgctatgcactgggtccgccaggctccagtgaaggggctggagtgggtggcaattatctcatatgatggaggcaatacatactacgcagactccgtgaagggccgattcaccatctccagagacaattccaagaacacgttgtatctgcaaatgaacagcctgacagctgaggacacggctgtgtattactgtgcgaaagatctggcctttagtgggagctttccatttcttgactattggggccagggaaccctggtcaccgtctcggcag

SEQ ID NO: 360 - DNA, 361 bp, Artificial Sequence
  Description of Artificial Sequence: Synthetic polynucleotide
gaggtgcagctggtggagtccgggggaggcttagttcagcctggggggtccctgagactctcctgtgcagcctctggattcaccttcagtagctactggatgcactgggtccgccaagctccagggaaggggctggtgtgggtctcacgtattaatagtgatgggagtagcacaacctacgcggactccgtgaagggccgattcaccatctccagagacaacgccaagaacacgctctatctacaaatgaacagtctgagagccgaggacatggctgtgtattactgtgtaagagagggtatagtggctacgatttattttgactactggggccagggaaccctggtcaccgtctcctcag

SEQ ID NO: 361 - DNA, 388 bp, Artificial Sequence
  Description of Artificial Sequence: Synthetic polynucleotide
cagctgcagctgcaggagtccggctcaggactggtgaagccttcacagaccctgtccctcacctgcgctgtctctggtggctccatcagcagtggtggttactcctggagctggatccggcagccaccagggaagggcctggagtggattgggtacatctatcatggtggaaacacctactacaacccgtccctcaagaatcgagtcaccatatcagaagacaggtccaagaaccagttctccctgaggctgagctctgtgaccgccgcggacacggccgtgtattactgtgccagagttcaaggatattgtactggtggtgtatgctatagcgttccgtactactttgacttctggggccagggaaccctggtcaccgtctcctcag

SEQ ID NO: 362 - DNA, 358 bp, Artificial Sequence
  Description of Artificial Sequence: Synthetic polynucleotide
caggtgcagctgcaggagtcgggcccaggactggtgaagccttcggagaccctgtccctcacctgcactgtctctggtggctccatcagtagttactactggagctggatccggcagcccccagggaagggactggagtggattgggtctatctattacagtgggagcaccaactacaacccctccctcaagagtcgagtcaccatatcagtagacacgtccaagaaccagttctccctgaagctgagctctgtgaccgctgcggacacggccgtgtattactgtgcggggtcatacagctatggttactcttggttcgacccctggggccagggaaccctggtcaccgtctcctcag

SEQ ID NO: 363 - DNA, 361 bp, Artificial Sequence
  Description of Artificial Sequence: Synthetic polynucleotide
caggtgcagctggtggagtctgggggaggcgtggtccagcctgggaggtccctgagactctcctgtgcagcctctggattcaccttcagtagctatggcatgcactgggtccgccaggctccaggcaaggggctggagtgggtggcagttatatcatatgatggaagtaataaatactatgcagactccgtgaagggccgattcaccatctccagagacaattccaagaacacgctgtatctgcaaatgaacagcctgagagctgaggacacggctgtgtattactgtgcgaaagctcaatgggttgggttcagcccgcttgactactggggccagggaaccctggtcaccgtctcctcag

SEQ ID NO: 364 - DNA, 376 bp, Artificial Sequence
  Description of Artificial Sequence: Synthetic polynucleotide
caggtgcagctggtggagtctgggggaggcgtggtccagcctgggaggtccctgagactctcctgtgcagcctctcgattcaccttcagtagctatggcatgcactgggtccgtcaggctccaggcaagggcctggagtgggtggcagttatatcatatgatggaagtaataaatactatgcagactccgtgaagggccgattcaccatctccagagagaattccaagaacacgctgtatctgcaaatggacagcctgagagctgaggacacggctgtgtattactgtgcgaaagcccaacgacattttgactacttattaaggagtgatgcttttgatatctggggccaagggacaatggtcaccgtctcttcag

SEQ ID NO: 365 - DNA, 364 bp, Artificial Sequence
  Description of Artificial Sequence: Synthetic polynucleotide
caggtgcagctggtggagtctgggggaggcgtggtccagcctgggaggtccctgagactctcctgtgcagcctctggattcaccttcagtagctatgctatgcactgggtccgccaggctccaggcaaggggctggagtgggtggcagttatatcatatgatggaagcaataaatactacgcagactccgtgaagggccgattcaccatctccagagacaattccaagaacacgctgtatctgcaaatgaacagcctgagagctgaggacacggctgtgtattactgtgcgagatcgagtggtgggagctactgggggtactttgactactggggccagggaaccctggtcaccgtctcctcag

SEQ ID NO: 366 - DNA, 385 bp, Artificial Sequence
  Description of Artificial Sequence: Synthetic polynucleotide
gaggtgcagctggtggagtctgggggaggcttggtagagcctggggggtccctgagactctcgtgtgcagcctctggtttcactttcaataacgcctggatgaactgggtccgccaggctccagggaaggggctggagtgggtcggccggattaaaagtaagactgatggtgggacaacagactacgctgcacccgtgagaggcagaatcaccatctccagaaatgattcaacaaacacgctgtttcttgtgatggacagcctgaaaagcgaggacgcagccttgtattactgcaccacagtccattctgactacctttgggggtcttatcgtaagggctactttgactactggggccagggagccctggtcaccgtctcctcgg

SEQ ID NO: 367 - DNA, 363 bp, Artificial Sequence
  Description of Artificial Sequence: Synthetic polynucleotide
caggtgcagctggtggagtctgggggaggcgtggtccagcctgggaggtccctgagactctcctgtgcagcctctgaattcaccttcagtagctatgctatgcactgggtccgccaggctccaggcaaggggctggagtgggtggcacttatatcatatgatggaagcaatgaatactacgcagactccgtgaagggccgattcaccgtctccagagacaattccaagaccacgctgtatctgcaaatgaacagcctgagagctgaggacacggctgtgtattactgtgcgagagccaggtccgggtcgtactactacggtatggacgtctggggccaagggaccacggtcaccgtctcctca

SEQ ID NO: 368 - DNA, 363 bp, Artificial Sequence
  Description of Artificial Sequence: Synthetic polynucleotide
caggtgcagctggtggagtctgggggaggcgtggtccagcctgggaggtccctgagactctcctgtgcagcctcgggattcaccttcagtagctatgctattcactgggtccgccaggctccaggcaaggggctggagtgggtgacacttatatcatatgatggaagcaataaatactacgcagactccgtgaagggccgaatcaccatctccagagacaattccaagaacacgttgtatttgcaaatgaacagcctgagagctgaggacacggctgtgtattactgtgcgagatcaacgggggggagctactactacggtatggacgtctggggccaagggaccacggtcaccgtctcctca

SEQ ID NO: 369 - DNA, 373 bp, Artificial Sequence
  Description of Artificial Sequence: Synthetic polynucleotide
gaggtgcagctggtggagtctgggggaggcctggtcaagcctggggggtccctgagactctcctgtgcagcctctgggttcaccttcagtcactataacatgaactgggtccgccaggctccagggaaggggctggagtgggtctcatccattactagtactggtagttacatatactacgcagactcactgaagggccgattcaccatctccagagacaacgccaagaactcactgtatctgcaaatgaacagcctgagagccgaggacacggctgtgtattactgtgcgagagagggccgaattgctggtatacccacgggggggctttttgactactggggccagggaaccctggtcaccgtctcctcag

SEQ ID NO: 370 - DNA, 337 bp, Artificial Sequence
  Description of Artificial Sequence: Synthetic polynucleotide
caggtgcagctgcaggagtcgggcccaggactggtgaagccttcggagaccctgtccctcacctgcactgtctctggtggctccatcagtagttactactggagctggatccggcagcccccagggaagggactggagtggattgggtatatctattacagtgggagcaccaactacaacccctccctcaagagtcgaatcaccatatcagtagacacgtccaagaaccagttctccctgaagctgagctctgtgaccgctgcggacacggccatgtattactgtgcgaggggctttgactactggggccagggaaccctggtcaccgtctcctcag

SEQ ID NO: 371 - DNA, 367 bp, Artificial Sequence
  Description of Artificial Sequence: Synthetic polynucleotide
caggtgcagctggtgcagtctgggactgaggtgaagaagcctggggcctcagtgaaggtttcctgcaagacatctggatacaggttcaccaactactatatccactgggtgcgacaggcccctggacaagggcttgagtggatgggcatattcaaccctaatggtggcggcacaagctacgcacagaggttccagggcagagtcaccttgaccagcgacacgtccgcgaacataggctacatggaactgaggagcctgacatctgaggacacggccgtttattactgtgcgagagatccacgcagttcgggtgacaatgatggttttgatatgtggggccaagggacaatggtcaccgtctcttcag

SEQ ID NO: 372 - DNA, 382 bp, Artificial Sequence
  Description of Artificial Sequence: Synthetic polynucleotide
caggtgcagctggtggagtctgggggaggcgtggtccagcctgggaggtccctgagactctcctgtgcagcgtctggattcaccttcagtaactatggcatgcactgggtccgccaggctccaggcaaggggctggagtgggtggcagttatatggtatgatggaagtaataaatactatgcagactccgtgaagggccgattcaccatctccagagacaattccaagaacacgctgtatctgcaaatgaacagcctgagagtcgaggacacggctgtgtattactgtgtgagagaccgccccccggattactttgatagtagtgccacccccgatgcttttgatatctggggccaagggacaatggtcaccgtctcttcag

SEQ ID NO: 373 - DNA, 379 bp, Artificial Sequence
  Description of Artificial Sequence: Synthetic polynucleotide
gaggtgcagctggtgcagtctggagcagaggtgaaaaagcccggggagtctctgaagatctcctgtaagggttctggatacagctttaccagctaccggatcggctgggtgcgccagatgcccgggaaaggcctggagtggatggggatcatctatcctggtgactctgataccaaatacagcccgtcctttcaaggccaggtcaccatctcagccgacaagtccatcagcaccgcctacctgcagtggagcagcctgaaggcctcggacaccgccatgtattactgtgcgagactttggcattgtggtggtgactgctatcctaaactgaactggctcgacccctggggccagggaaccctggtcaccgtctcctcag

SEQ ID NO: 374 - DNA, 361 bp, Artificial Sequence
  Description of Artificial Sequence: Synthetic polynucleotide
caggtgcagctggtggagtctgggggaggcgtggtccagcctgggaggtccctgagactctcctgtgcagcctctggattcaccttcagtacctatgctatgtactgggtccgccaggctccaggcaaggggctggagtgggtggcagttatatcatatgatggaaacaataaatactacgcagactccgtgaagggccgattcaccatctccagagacaattccaagaacacgctgtatctgcaaatgaacagcctgagagttgaggacacggctgtgtattactgtgcgagaggcgggggggggaactacttcttttttgactcctggggccagggaaccctggtcaccgtctcctcag

SEQ ID NO: 375 - DNA, 358 bp, Artificial Sequence
  Description of Artificial Sequence: Synthetic polynucleotide
gaggtgcagctggtggagtctgggggaggcttggtccagcctggggggtccctgagactctcctgtgcagcctctggattcacctttagtagctattggatgagctgggtccgccaggctccagggaaggggctggagtgggtggccaatataaagcaagatggaagtgagaaatactatgtggactctgtgaagggccgattcaccatctccagagacaacgccaagaactcactgtatctgcaaatgaacagcctgagagccgaggacacggctgtgtattactgtgcggggttgagtagcagcagctggaaccttgactactggggccagggaaccctggtcaccgtctcctcag

SEQ ID NO: 376 - DNA, 367 bp, Artificial Sequence
  Description of Artificial Sequence: Synthetic polynucleotide
cagatcaccttgaaggagtctggtcctacgctggtgaaacccacacagaccctcacgctgacctgcaccttctctgggttctcactcagcactagtggagtgggtgtgggctggatccgtcagcccccaggaaagaccctggagtggcttgcactcatttattgggatgatgataagcgctacagcccatctctgaagagcaggctcaccatcaccaaggacacctccaaaaaccaggtggtccttacaatgaccaacatggaccctgtggacacagccacatattactgtgcacacagacggggacttctgatgtacaactgcttcgacccctggggccagggaaccctggtcaccgtctcctcag

SEQ ID NO: 377 - DNA, 376 bp, Artificial Sequence
  Description of Artificial Sequence: Synthetic polynucleotide
cagctgcagctgcaggagtcgggcccaggactggtgaagccttcggagaccctgtccctcacctgcactgtctctggtggctccattagcagtagtagttattactggggctggatccgccagcccccagggaaggggctggagtggattgggagtatgtattatagtgggagcacctacgacaacccgtccctcaagagtcgggtcatcatatccgtagacacgtccaagaaccaattctccctgaagctgagctctgtgaccgccgcagacacggctgtgtattactgtgtgagacagaatcacaatatgcttcagggaccacaccatgtttttgatatttggggccaagggacaatggtcaccgtctcctcag

SEQ ID NO: 378 - DNA, 385 bp, Artificial Sequence
  Description of Artificial Sequence: Synthetic polynucleotide
gaggtgcagctggtggagtctgggggaggcttggttaagcctggggggtcacttagactctcctgtgcagcctctggtttcactttcaacaacgcctggatgaactgggtccgccaggctccagggaaggggctggagtgggtcggccgtgttaaaagcgagaatgatggtgggacaacagactacgctgcacccgtgagaggcagattcaccatctcaagaaatgattctctaaacacgctgtttttggtcatacacgacccgagaatcgaagacacagccttgtattactgtacgacagtccattctgattacgtttggggatcttatcgtaaggggtattttgactactggggccagggagccctggtcaccgtctcctcag

SEQ ID NO: 379 - DNA, 358 bp, Artificial Sequence
  Description of Artificial Sequence: Synthetic polynucleotide
cagatcaccttgaaggagtctggtcctacgctggtgaaacccacacagaccctcacactgacctgcaccttctctggcttctcactcagcactactggagtgggtgtgggctggatccgtcagcccccaggaaaggccctggagtggcttgcactcatttattgggatgatgataagcgctacagcccatctctgaagagcaggctcaccatcaccaaggacacctccaaaaaccaggtggtccttacaatgaccaacatggaccctgtggacacagccacatattactgtgcacactatatagcaattcggccctttgactactggggccagggaaccctggtcaccgtctcctcag

SEQ ID NO: 380 - DNA, 358 bp, Artificial Sequence
  Description of Artificial Sequence: Synthetic polynucleotide
gaggtgcagctggtggagtctgggggaggcttggtccagcctgggaggtccctgagactctcctgtgcagcctctggattcacctttagtacctattggatgagttgggtccgccaggctccagggaaggggctggagtgggtggccaacataaagcaagatggaagtgagaaatactatgtggactctgtgaagggccgattcaccatctccagagacaacgccaagaactcactgtatctgcaaatgaacagcctgagagccgaggacacggctgtgtattactgtgcgagactgtcggtcctcggctggtacttcgatctctggggccgtggcaccctggtcactgtctcctcag

SEQ ID NO: 381 - DNA, 382 bp, Artificial Sequence
  Description of Artificial Sequence: Synthetic polynucleotide
caggtgcagctggtgcagtctggggctgaggtgaagaggcctggggcctcagtgagggtctcctgcaaggcttctggatacaccttcagcagttatgatatcaactgggtgcgacaggcccctggacaagggcttgagtggatgggatggatgagccctaacggtggaaacactggctatgcacagaggttccaaggcagagtcaccatgaccagggacaactccataagtacagcctacatggagctgagcggcctcggacctgaggactcggccgtgtactactgtgcgagaggcgaattggatgatgacatttggggaacatattcaatgaggtggttcgacccctggggccagggaaccctggtcaccgtctcctcag

SEQ ID NO: 382 - DNA, 378 bp, Artificial Sequence
  Description of Artificial Sequence: Synthetic polynucleotide
caggtgcagctggtgcagtctggggctgaggtgaagaagcctgggtcctcggtgaaggtctcctgcaaggcttctggaggcaccttcagcagctatgctatcagctgggtgcgacaggcccctggacaagggcttgagtggatgggaaggatcatccctatctttggtatagcaaactacgcacagaagttccagggcagagtcacgattaccgcggacaaatccacgagcacagcctacatggagctgagcagcctgagatctgaggacacggccgtgtattactgtgcgagagccccccaggctacggtgactacgttcaactactactacggtttggacgtctggggccaagggaccacggtcaccgtctcctca

SEQ ID NO: 383 - DNA, 367 bp, Artificial Sequence
  Description of Artificial Sequence: Synthetic polynucleotide
caggtgcagctggtggagtctgggggaggcgtggtccagcctgggaggtccctgagactctcctgtacagcgtctggattcaccctcagtacctatggcatgcactgggtccgccagactccaggcaaggggctggagtgggtggctgttatatggtatgatggaagtaatgaatatcatgcaggctccgtgaagggccgattcaccatctccagagacaattccaagaacacggtgtatctgcaaatgaatagcctgggagccgaggacacggctctatattactgtgcgagaagtcgggactggggccactcctactggtacttcgatgtctggggccgtggcaccctggtcagtgtctcctcag

SEQ ID NO: 384 - DNA, 358 bp, Artificial Sequence
  Description of Artificial Sequence: Synthetic polynucleotide
gaggtgcagctggtggagtctgggggaggcttggtccagcctggggggtccctgagactctcctgtgcagcctctggattcacctttagtagctattggatgagctgggtccgccaggctccagggaaggggctggagtgggtggccaacataatgcaagatggaagtgagaaatactatgtggactctgtgaagggccgattcaccatctccagagacaacgccaagaactcactgtatctgcaaatgaacagcctgagagccgaggacacggctgtgtattactgtgcgagagtccctagcagcaactggtgctttgactactggggccagggaaccctggtcaccgtctcctcag

SEQ ID NO: 385 - DNA, 358 bp, Artificial Sequence
  Description of Artificial Sequence: Synthetic polynucleotide
gaagtgcagctggtggagtctgggggagtcgtggtacagcctggggggtccctgagactctcctgtgcagcctctggattcacctttgatgattacaccatgcactgggtccgtcaagctccggggcagggtctggagtgggtctctcttgttagttgggatgggagcacattctatgcagactctgtgaagggccgattcaccgtctccagagacaacagccaaaactccctgtatctgcaaatgagcagtctgagagctgaggacaccgccttatattactgtgcgaaagctaaagactcgtatactgagtactttgactactggggccagggaaccctggtcaccgtctcctccg

SEQ ID NO: 386 - DNA, 384 bp, Artificial Sequence
  Description of Artificial Sequence: Synthetic polynucleotide
caggtgcagctggtggagtctgggggaggcgtggtccagcctgggaggtccctgagactctcctgtgcagcctctggattcaccttcagtaactatgctttgcactgggtccgccaggctccaggcagggggctggagtgggtggcagttatatcatatgatggaagcaataaatactacgctgactccgtgaagggccgattcaccatctccagagacaattccaagaacacgctgtatctgcaaatgagcagcctgagatctgaggacacggctgtgtattactgtgcgagagatcggcgggtgtgggagctactggcctattactactactactacggtatggacgtctggggccaagggaccacggtcaccgtctcctca

SEQ ID NO: 387 - DNA, 372 bp, Artificial Sequence
  Description of Artificial Sequence: Synthetic polynucleotide
caggtgcagctggtggagtctgggggaggcgtggtccagcctgggaggtccctgagactctcctgtgcagcctctggattcaccttcagtaactttgctatgcactgggtccgccaggctccaggcaaggggctggagtgggtggcagttatatcatatgatggaagcaataaatactacgcagactccgtgaagggccgattcaccatctccagagacaattccaagaacactctgtatctgcaagtgaacagcctgagagctgatgacacggctttgtattactgtgcgggaagccaaggcgaagccggctactactactactacggtatggacgtctggggccaagggaccacggtcaccgtctcctca

SEQ ID NO: 388 - DNA, 355 bp, Artificial Sequence
  Description of Artificial Sequence: Synthetic polynucleotide
caggtgcagctggtgcagtctggggctgaggtgaagaagcctggggcctcagtgaaggtctcctgcgaggcttctggatacaccttcaccagttatgatatcaactgggtgcgacaggccactggacaagggcttgagtggatgggatggatgaaccctaacagtggtaacacaggctatgcacagaagttccagggcagagtcaccatgaccaggaacacctccataagtacagcctacatggagctgagcagcctgagatctgaggacacggccatgtattactgtgcgagagatagtattggtggtgtaccagggaactggggccagggaaccctggtcaccgtctcctcag

SEQ ID NO: 389 - DNA, 363 bp, Artificial Sequence
  Description of Artificial Sequence: Synthetic polynucleotide
caggtgcagctggtggagtctgggggaggcgtggtccagcctgggaggtccctgagactctcctgtgcagcctctggattcaccttcagtagctatgctatgcactgggtccgccaggctccaggcaaggggctggagtgggtggcagttatatcatatgatggaagtaataaaaactacgcagactccgtgaagggccgattcaccatctccagagacaattccaagaacacgctgtatctgcaaatgaacagcctgagagctgaggacacggctgtgtattactgtgcgaggtcgacagagggaggctactactacggtatggacgtctggggccaaggaaccacggtcaccgtctcctca

SEQ ID NO: 390 - DNA, 425 bp, Artificial Sequence
  Description of Artificial Sequence: Synthetic polynucleotide
cagctgcagctgcaggagtcgggcccaggattggtgaagccttcggagaccctgtccctcacctgcactgtcgctggtggctccatcagcagtagtagttactattggggctggatccgccagcccccagggaaggggctggagtggattgggagtatctattatagtgggagcaccttctacaacccgtccctcaagagtcgagtcaccatatccgtagacacgtccaagaaccagttctccctgaagctgagctctgtgaccgccgcagacacggctgtgtattggtgtgcgagacatgttgcgagcagctctaatgaattaaggtcttgactactggggccagggaaccctggtcaccgtctcctcaggactattacggaatggacgtctggggccttcggaccacggtcaccgtctcctca

SEQ ID NO: 391 - DNA, 379 bp, Artificial Sequence
  Description of Artificial Sequence: Synthetic polynucleotide
caggtgcagctggtgcagtctggggctgaggtgaagaagcctggggcctcagtgaaggtttcctgcaaggcatctggatacaccttcaccagctactatatacactgggtgcgacaggcccctggacaagggcttgagtggatgggaataatcaaccctagtggtggtagcacaagctacgcacagaagttccagggcagagtcaccatgaccagggacacgtccacgagcacagtctacatggagctgagcagcctgagatctgaggacacggccgtgtattactgtgcgagaggaggaggggattacgatttttggagtggttattcaaatgcttttgatatctggggccaagggacaatggtcaccgtctcttcag

SEQ ID NO: 392 - DNA, 373 bp, Artificial Sequence
  Description of Artificial Sequence: Synthetic polynucleotide
gaggtccagctggtacagtctggggctgaggtgaagaagcctggggctacagtgaagatctcctgcaaggtttctggatacaccttcaccgactaccacatacagtgggtgcaacaggcccctggaaaaggacttgagtggatgggacttgttgatcctcaagatggagaaacaatatatgcagagaaattccagggcagaatcaccataaccgcggacacgtctacagacacagcctacatggagctgggtagcctgagatctgaggacacggccgtctattactgtgcaacagatcaatcggactttgatacaagtggttatggtgtttttgatttttggggccaagggacaatggtcaccgtctcctcag

SEQ ID NO: 393 - DNA, 372 bp, Artificial Sequence
  Description of Artificial Sequence: Synthetic polynucleotide
caggttcagctggtgcagtctggagctgaggtgaagaagcctggggcctcagtgaaggtctcctgcaaggcttctggttacacctttgccaactatggtttcacctgggtgcgacaggcccctggacaagggcttgagtggatgggatggatcagcgcttacaatggtaaaacaagctgtgcacagaacctccagggcagagtcaccatgaccacagacacatccacgagcacagcctacatggagctgacgagcctgagatctgacgacacggccgtgtattactgtgcgagaatagagggtgaggggagttactactactactacggtatggacgtctggggccaagggaccacggtcaccgtctcctca

SEQ ID NO: 394 - DNA, 364 bp, Artificial Sequence
  Description of Artificial Sequence: Synthetic polynucleotide
caggtgcagctggtggagtctgggggaggagtggtccagcctgggagctccctgagactctcctgtgcatcctctggattcaccttcagtacctatggcatgcactgggtccgccaggctccagccaaggggctggagtgggtggcagttatatcatatgatggaagtaataaatactcagcagactctgagaagggccgattcaccatctccagagacaattccaagaacacgctgtatctgcaaatgaacagcctgagagctgaggacacggctgtgtattactgtgcgaaatctgattcggcgtttgtacctcgtttcgactactggaagaccacggaagccatggtcaccgcctcctcct

SEQ ID NO: 395 - DNA, 382 bp, Artificial Sequence
  Description of Artificial Sequence: Synthetic polynucleotide
gaggtgcagctggtggagtctgggggaggcctggtcacgcctggggggtccctgagactctcctgtgcagcctctggattcaccttcagtagccatagcatgaactgggtccgccaggctccagggaaggggctggagtgggtctcatccattagtactagtagtagttacatatactacgcagactcagtgaagggccgattcaccatctccagagacaacgccaagaactcactgtatctgcaaatgaacagcctgagagccgaggacacggctgtgtattactgtgcgagagatcaggggggcccttatgatcgtagtggttattacccccacgggcttgactactggggccagggaaccctggtcaccgtctcctcag

SEQ ID NO: 396 - DNA, 375 bp, Artificial Sequence
  Description of Artificial Sequence: Synthetic polynucleotide
caggtgcagctgcaggagtcgggcccaggactggtgaagccttcacagaccctgtccctcacctgcactgtctctggtggctccatcagcagtggtgattactactggagctggatccgccagcacccagggaagggcctggagtggattgggaacatcttttacagtgggagcacctacgacaacccgtccctcaagagtcgacttagcatatcggtagacacgtctaagaaccagttctccctgaagctgagctctgtgactgccgcggacacggccgtgtattactgtgcgagagtagtgggggatttttggagtcagtactactacggtatggacgtctggggccaagggaccacggtcaccgtctcctca

SEQ ID NO: 397 - DNA, 376 bp, Artificial Sequence
  Description of Artificial Sequence: Synthetic polynucleotide
gaggtccagctggtacagtctggggctgaggtgaagaagcctggggctacagtgaaaatctcctgcaaggtttctggatacaccttcaccgactactacatgcactgggtgcaacaggcccctggaaaagggcttgagtggatgggacttgttgatcctgaagatggtgaaacaatatacgcagagaagttccagggcagagtcaccataaccgcggacacgtctacagacacagcctacatggagctgagcagcctgagatctgaggacacggccgtgtattactgtgcaacagagagatattgtagtggtggtagctgctactcctcctggttcgacccctggggccagggaaccctggtcaccgtctcctcag

SEQ ID NO: 398 - DNA, 369 bp, Artificial Sequence
  Description of Artificial Sequence: Synthetic polynucleotide
caggtgcagctggtggagtctgggggaggcgtggtccagcctgggaggtccctgagactctcctgtgcagcgtctggattcaccttcagcacctacgccatgcactgggtccgccaggctccaggcaaggggctggagtgggtggcagttatctggtatgaaggaaataataaagactatgcagactccgtgaagggccgattcaccgtctccagagacaattccaagaacacgctgtatctgcaaatgaacagtctgagagccgaggacacggctgtgtattactgtgcgagagcctcagcagattatagcgactactactacggcatggacgtctggggccgggggaccaaggtcatcgtctcctca

SEQ ID NO: 399 - DNA, 367 bp, Artificial Sequence
  Description of Artificial Sequence: Synthetic polynucleotide
caggttcagctggtgcagtctggagctgaggtgaagaagcctggggcctcagtgaaggtctcctgcaaggcttctggttacacctttaacagctatggtatcagctgggtgcgacaggcccctggacaagggcttgagtggatgggatggatcagcgcttacaatggtaacacaaactattcacagaagctccagggcagagtcaccatgaccacagacacatccacgagcacagcctacatggagctgaggagcctgagatctgacgacacggccgtgtattactgtgcgagatcccatttgtattactatggttcaggccccattgactactggggccagggaaccctggtcaccgtctcctcag

SEQ ID NO: 400 - DNA, 358 bp, Artificial Sequence
  Description of Artificial Sequence: Synthetic polynucleotide
caggtgcagctgcaggagtcgggcccaggactggtgaagccttcggggaccctgtccctcacctgcgctgtctctggtggctccatcagcagtagtaactggtgcagttgggtccgccagcccccagggaaggggctggagtggattggggaaatctatcatagtgggagcaccaactacaacccgtctctcaagagtcgagtcaccatgtcagtggacaagtccaagaaccagttctccctgaagctgagctctgtgaccgccgcggacacggccgtgtattactgtgcgcagaaacctatgcctcagggagttatttcgaactggggccagggaaccctggtcaccgtctcctcag

SEQ ID NO: 401 - DNA, 331 bp, Artificial Sequence
  Description of Artificial Sequence: Synthetic polynucleotide
cagtctgccctgactcagcctccctccgcgtccgggtctcctggacagtcagtcaccatctcctgcactggaaccagcagtgacgttggtgtttataagtatgtctcctggtaccaacaccacccaggcaaaacccccaaagtcataatttatgaggtctctaagcggccctcaggggtccctgatcgcttctctggctccaagtctggcaacacggcctccctgaccgtctctgggctccaggctgaagatgaggctgattattactgcacctcatatgaagccgacaacactttggtcctcggcggagggaccaagctgaccgtcctag

SEQ ID NO: 402 - DNA, 331 bp, Artificial Sequence
  Description of Artificial Sequence: Synthetic polynucleotide
cagtctgccctgactcagcctccctccgcgtccgggtctcctggacagtcagtcaccatctcctgcactggaaccagcattgaccttggtgtttataagtatgtctcctggtaccaacaccacccaggcaaagcccccaaactcataatttatgaggtctctaagcggccctcaggggtccctgatcgcttctctggctctaagtctggcaacacggcctccctgaccgtctctgggctccaggctgaagatgaggctgattattattgcacctcatatgaaggcgacaacactttggtgttcggcggagggaccaagctgaccgtccttg

SEQ ID NO: 403 - DNA, 334 bp, Artificial Sequence
  Description of Artificial Sequence: Synthetic polynucleotide
aattttatgctgactcagccccactctgtgtcggagtctccggggaagacggttaccatctcctgcaccggcagcagtggcagcattgccagcaactatgtgcagtggtaccagcagcgcccgggcagtgcccccaccactgtgatctatgaggataaccaaagaccctctggggtccctgatcggttctctggctccatcgacagctcctccaactctgcctccctcaccatctctggactgaagactgaggacgaggctgactactactgtcagtcttatgatagcagcacctattgggtgttcggcggagggaccaagctgaccgtcctag

SEQ ID NO: 404 - DNA, 331 bp, Artificial Sequence
  Description of Artificial Sequence: Synthetic polynucleotide
cagtctgtgctgactcagccaccctcagcgtctgggacccccgggcagagggtcaccatctcttgttctggaagcagctccaacatcggaagtaattatgtatactggtaccagcagctcccaggaacggcccccaaactcctcatctataggaataatcagcggccctcaggggtccctgaccgattctctggctccaagtctggcacctcagcctccctggccatcagtgggctccggtccgaggatgaggctgattattactgtgcagcatgggatgacagcctgagtggtgtggtattcggcggagggaccaagctgaccgtcctag

SEQ ID NO: 405 - DNA, 331 bp, Artificial Sequence
  Description of Artificial Sequence: Synthetic polynucleotide
cagtctgccctgactcagcctccctccgcgtccgggtctcctggacagtcagtcaccatctcctgcactggaaccagcagtgacgttggtggttataactatgtctcctggtaccaacagcacccaggcaaagcccccaaactcatgatttatgaggtcagtcagcggccctcaggggtccctgatcgcttctctggctccaagtctggcaacacggcctccctgaccgtctctgggctccaggctgaggatgaggctgattattactgcagctcatatgcaggcagcaacattggcgtgttcggcggagggaccacgctgaccgtcctag

SEQ ID NO: 406 - DNA, 325 bp, Artificial Sequence
  Description of Artificial Sequence: Synthetic polynucleotide
gacatccagatgacccagtctccatcctccctgtctgcatctgtaggagacacagtcaccatcacttgccgggcaagtcagaacattaacaactatttaaattggtatcagcagaaaccagggaaagcccctaagctcctgatctatgctgcatccagtttgcaaagtggggtcccatcaaggttcagtggcagtggatctgagacagatttcactctcaccatcagcagtctgcaacctgaagattttgcaacttactactgtcaacagagttacagtaccccccagtacagttttggccaggggaccaagctggagatcaaac

SEQ ID NO: 407 - DNA, 325 bp, Artificial Sequence
  Description of Artificial Sequence: Synthetic polynucleotide
gacatccagttgacccagtctccatccttcctgtctgcatctgtaggagacagagtcaccatcacttgccgggccagtcagggcattagcagttatttagcctggtatcagcaaaaaccagggaaagcccctaagctcctgatctatgctgcatccactttgcaaagtggggtcccatcaaggttcagcggcactggatctgggacagaattcactctcacaatcagcagcctgcagcctgaagattttgcaacttattactgtcaacagcttgatagttaccctccgtacacttttggccaggggaccaagctggagatcaaac

SEQ ID NO: 408 - DNA, 325 bp, Artificial Sequence
  Description of Artificial Sequence: Synthetic polynucleotide
gaaattgtgttgacgcagtctccaggcaccctgtctttgtctccaggggaaagagccaccctctcctgcagggccagtcagagtgttagcagcagttacttagcctggtaccagcagaaacctggccaggctcccaggctcctcatttatggtgcgtccagcagggccactggcatcccagacaggttcagtggcagtgggtctgggacagacttcactctcaccatcagcagattggagcctgaagattttgcagtgtattactgtcagcagtatggtagctcaccgtggacgttcggccaagggaccaaggtggaaatcaaac

SEQ ID NO: 409 - DNA, 334 bp, Artificial Sequence
  Description of Artificial Sequence: Synthetic polynucleotide
aattttatgctgactcagccgcactctgtgtcggagtctccggggaagacggtaaccatctcctgcacccgcagcagtggcagcattgccagcaactatgtgcagtggtaccagcagcgcccgggcagtgcccccaccactgtgatctatgaggataaccaaagaccctctggggtccctgatcggttctctggctccatcgacagctcctccaactctgcctccctcaccatctctggactgaagactgaggacgaggctgactactactgtcagtcttatgatagcaccaatctttgggtgttcggcggagggaccaagctgaccgtcctag

SEQ ID NO: 410 - DNA, 331 bp, Artificial Sequence
  Description of Artificial Sequence: Synthetic polynucleotide
cagtctgccctgactcagcctgcctccgtgtctgagtctcctggacagtcgatcaccatctcctgcactggaaccagcagtgacgttggtggttataactatgtctcctggtaccaacaacacccaggcaaagcccccaaactcatgacttatgatgtcagtaatcggccctcaggggtttctaatcgcttctctggctccaagtctggcaacacggcctccctgaccatctctgggctccaggctgaggacgaggctgattattactgcagctcatattctagcagcagcacttgggtgttcggcggagggaccaagctgaccgtcctag

SEQ ID NO: 411 - DNA, 322 bp, Artificial Sequence
  Description of Artificial Sequence: Synthetic polynucleotide
gacatccagttgacccagtctccatccttcctgtctgcatctgtaggagacagagtcaccatcacttgccgggccagtcagggcattagcagttatttagcctggtatcagcaaaaaccagggaaagcccctaagctcctgatctatgctgcatccactttgcaaagtggggtcccatcaaggttcagcggcagtggatctgggacagaattcactctcacaatcagcagcctgcagcctgaagattttgcaacttattactgtcaacagcttaatagttaccctctaacgttcggccaagggaccaaggtggaaatcaaac

SEQ ID NO: 412 - DNA, 334 bp, Artificial Sequence
  Description of Artificial Sequence: Synthetic polynucleotide
cagtctgtgctgacgcagccgccctcagtgtctggggccccagggcagagggtcaccatctcctgcactgggagcagctccaacatcggggcaggttatgatgtacactggtaccagcagcttccaggaacagcccccaaactcctcatctatggtaacaataatcggccctcaggggtccctgaccgattctctgactccaagtctggcacctcagcctccctggccatcactaggctccaggctgaggatgaggctgattattactgccagtcctatgacagcagcctgagtggttgggtgttcggcggagggaccaagttgaccgtcctag

SEQ ID NO: 413 - DNA, 322 bp, Artificial Sequence
  Description of Artificial Sequence: Synthetic polynucleotide
gacatccagatgacccagtctccttccaccctgtctgcatctgttggagacagagtcaccatcacttgccgggccagtcagagtattagtagctggttggcctggtatcagcagaaaccagggaaagcccctaagctcctgatttataaggcgtctagtttggaaagtggggtcccatcaaggttcagcggcagtggatctgggacagaattcactctcaccatcagcagcctgcagcctgatgattttgcaacttattactgccaacaatatgatagttattcttggacgttcggccaagggaccaaggtggaaatcaaac

SEQ ID NO: 414 - DNA, 334 bp, Artificial Sequence
  Description of Artificial Sequence: Synthetic polynucleotide
cagtctgtgctgactcagccaccctcagtctctgggacccccgggcagagggtcaccatctcctgttctgggagcagctccaacatcggaggtaattttgtatactggtatcagcaattcccaggaacggcccccaaactcctcatctatttgaataaccggcggccctcaggggtccctgaccgattctctggctccaactctggcacctcagcctccctggccatcagtgggctccggtccgaggatgaggctgaatattactgtgcagcatgggatgacagcctgagtggtcagaaagttttcggaactgggaccaaggtcaccgtcctag

SEQ ID NO: 415 - DNA, 331 bp, Artificial Sequence
  Description of Artificial Sequence: Synthetic polynucleotide
cagtctgccctgactcagcctgcctccgtgtctgggtctcctggacagtcgatcaccatctcctgcactggaaccagcagtgatattgggagttataaccttgtctcctggtaccaacagcacccaggcaaagcccccaaactcatgatttatgagggcagtaagcggccctcaggggtttctaatcgcttctctggctccaagtctggcaacacggcctccctgacaatctctgggctccaggctgaggacgaggctgattattactgctgctcatatgcaggtagtagcacttatgtcttcggaactgggaccaaggtcaccgtcctag

SEQ ID NO: 416 - DNA, 316 bp, Artificial Sequence
  Description of Artificial Sequence: Synthetic polynucleotide
tcctatgtgctgactcagccaccctcagtgtcagtggccccaggaaagacggccaggattacctgtgggggaaacagcattggaagtaaaaatgtgcactggtaccagcagaagccaggccaggcccctgtgctggtcatctattatgatagcgaccggccctcagggatccctgagcgattctctggctccaactctgggaacacggccaccctgaccatcagcagggtcgaagccggggatgaggccgactattactgtcaggtgtgggatatcggtgtggtattcggcggagggaccaagctgaccgtcctag

SEQ ID NO: 417 - DNA, 322 bp, Artificial Sequence
  Description of Artificial Sequence: Synthetic polynucleotide
gaaattgtgctgactcagtctccagactttcagtctgtgactccaaacgagaaagtcaccatcacctgccgggccagtcagagcattggtagtagcttacactggtaccagcagaagccagatcagtctccaaagctcctcatcaagtatgcttcccagtccttctcaggggtcccctcgaggttcagtggcagtggatctgggacagatttcaccctcaccatcaatagcctggaagctgaagatggtgcaacgtattactgtcatcagagtagtagtttccctcgaacgttcggccaagggaccaaggtggaaatcaaac

SEQ ID NO: 418 - DNA, 331 bp, Artificial Sequence
  Description of Artificial Sequence: Synthetic polynucleotide
cagtctgccctgactcagcctgcctccgtgtctgggtctcctggacagtcgatcaccatctcctgcactggaaccagcagtgacgttggtggttataactatgtctcctggtaccaacaacacccaggcaaagcccccaaactcatgatttatgatgtcagtaatcggccctcaggggtttctaatcgcttctctggctccaagtctggcaacacggcctccctgaccatctctgggctccaggctgaggacgaggctgattattactgcagctcatatacaagcagcagcacttgggtgttcggcggagggaccaagctgaccgtcctag

SEQ ID NO: 419 - DNA, 334 bp, Artificial Sequence
  Description of Artificial Sequence: Synthetic polynucleotide
aattttatgctgactcagccgcactctgtgtcggagtctccggggaagacggtaaccatctcctgcacccgcagcagtggcagcattgccagcaataatgtgcagtggtaccagcagcgcccgggcagtgcccccaccactgtgatctatgaggataaccaaagaccctctggggtccctgatcggttctctggctccatcgacagctcctccaactctgcctccctcaccatctctggactgaagactgaggacgaggctgactactactgtcagtcttatgatagcagtaatcatgtggtattcggcggagggaccaagctgaccgtcctag

SEQ ID NO: 420 - DNA, 325 bp, Artificial Sequence
  Description of Artificial Sequence: Synthetic polynucleotide
gaaattgtgttgacgcagtctccagccaccctgtctttgtctccaggggaaagagccaccctctcctgcggggccagtcagagtgttaccagcaggtacttagcctggtaccagcagaaacctggcctggcgcccaggctcctcatctatgatgcatccagcagggccactggcatcccagacaggttcagtggcagtgggtctgggacagagttcactctcaccatcagcagactggagcctgaagattttgcagtgtattactgtcagcagtatggtagctcacctcgaacgttcggccaagggaccaaggtggaaatcaaac

SEQ ID NO: 421 - DNA, 322 bp, Artificial Sequence
  Description of Artificial Sequence: Synthetic polynucleotide
gaaattgtgttgacgcagtctccaggcaccctgtctttgtctccaggggaaagagccaccctctcctgcagggccagtcagagtgttagcagcagctacttagcctggtaccagcagaaacctggccagactcccaggctcctcatctatggtgcatccagcagggccaccggcatcccagccaggttcagtggcagtgggtctgggacaaacttcactctcaccatcagcagactggagcctgaagattttgcagtgtattactgtcagcagtatagtagctcacggacgttcggccaagggaccaaggtggaaatcaaac

SEQ ID NO: 422 - DNA, 325 bp, Artificial Sequence
  Description of Artificial Sequence: Synthetic polynucleotide
tcctatgtgctgactcagccaccctcagtgtcagtggccccaggaaagacggccaggattacctgtgggggaaacaacattggaagtaaaaatgtgcactggtaccagcagaagccaggccaggcccctgtgctggtcatctattatgataacgaccggccctcagggatccctgagcgattctctggctccaactctgggaacacggccaccctgaccatcagcagggtcgaagccggggatgaggccgactattactgtcaggtgtgggatggtactagtgatcccgtggtattcggcggagggaccaagctgaccgtcctag

SEQ ID NO: 423 - DNA, 331 bp, Artificial Sequence
  Description of Artificial Sequence: Synthetic polynucleotide
cagtctgccctgactcagcctccctccgcgtccgggtctcctggacagtcagtcaccatctcctgcactggaaccagcagtgaccttggtgtttataagtatgtctcctggtaccaacaccacccaggcaaagcccccaaactcatggtttatgaggtcagtaagcggccctcaggggtccctgatcgcttctctggctccaagtctggcaacgcggcctccctgaccgtctctgggctccaggctgaggatgaggctgattattactgcacctcatatgaaggcgacaacactttggtgttcggcggagggaccaagctgaccgtcctag

SEQ ID NO: 424 - DNA, 322 bp, Artificial Sequence
  Description of Artificial Sequence: Synthetic polynucleotide
gacatccagatgacccagtctccatcctccctgtctgcatctgtaggagacagagtcaccatcacttgccaggcgagtcaggacattagcaactatttaaattggtatcagcacaaaccagggaaagcccctaagctcctgatctacgatgcatccaatttggaaacaggggtcccatcaaggttcagtggaagtggatctgggacagattttactttcaccatcagcagcctgcagcctgaagatattgcaacatattactgtcaacagtatgaaaatctcccgctcactttcggcggagggaccaaggtggagatcaaac

SEQ ID NO: 425 - DNA, 334 bp, Artificial Sequence
  Description of Artificial Sequence: Synthetic polynucleotide
cagtctgtgctgacgcagccgccctcagtgtctggggccccaggacagagggtcaccatctcctgcactgggagcggctccaacatcggggcaggttatggtgtccactggtaccagcagtttccgggaacagcccccaaattcctcatttatgctaacacaaatcggccctcaggggtccctgaccgattcactggctccaagtctggcacctcagcctccctggccatcactgggctccaggctgaggatgaggctgattattattgccagtcttatgacagcagtatcagcggttgggtgttcggcggagggaccaaggtgaccgtcctac

SEQ ID NO: 426 - DNA, 322 bp, Artificial Sequence
  Description of Artificial Sequence: Synthetic polynucleotide
gacatccagatgacccagtctccatcctccctgtctgcatctgtaggagacagagtcaccatcacttgccgggcaagtcagagcattagcaactatttaaattggtatcagcagaaaccagggaaagcccctaagctcctgatctatgctgcatccagtttgcaaagtggggtcccatcaaggttcagtggcagtggatctgggacagatttcactctcaccatcagcagtctgcaacctgaagattttgcaacttactactgtcaacagagttacagtccccctcccacttttggccaggggaccaagctggagatcaaac

SEQ ID NO: 427 - DNA, 331 bp, Artificial Sequence
  Description of Artificial Sequence: Synthetic polynucleotide
cagtctgccctgactcagcctgcctccgtgtctgggtctcctggacagtcgatcaccatctcctgcactggaaccagcagtgacgttggtggttataactatgtctcctggtaccaacaacacccaggcaaagcccccaaactcatgatttatgatgtcagtaatcggccctcaggggtttctaatcgcttctctggctccaagtctggcaacacggcctccctgaccatctctgggctccaggctgaggacgaggctgattatttctgcagctcatatacaagcagcagcacttgggtgttcggcggagggaccaagctgaccgtcctag

SEQ ID NO: 428 - DNA, 334 bp, Artificial Sequence
  Description of Artificial Sequence: Synthetic polynucleotide
cagtctgtgctgacgcagccgccctcagtgtctggggccccagggcagagggtcaccatctcctgcactgggagcagctccaacatcggggcaggttatgatgtacactggtaccagcagcttccaggaacagcccccaaactcctcatctatggtaacagcaatcggccctcaggggtccctgaccgattctctggctccaagtctggcacctcagcctccctggccatcactgggctccaggctgaggatgaggctgattattactgccagtcctatgacagcagcctgagtgtttatgtcttcggaactgggaccaaggtcaccgtcctag

SEQ ID NO: 429 - DNA, 322 bp, Artificial Sequence
  Description of Artificial Sequence: Synthetic polynucleotide
gaaattgtgctgactcagtctccagactttcagtctgtgactccaaacgagaaagtcaccatcacctgccgggccagtcagagcattggtagtagcttacactggtaccagcagaagccagatcagtctccaaagctcctcatcaagtatgcttcccagtccctctcaggggtcccctcgaggttcagtggcagtggatctgggacagatttcaccctcaccatcaatagcctggaagttgaagatggtgcaacgtattactgtcatcagagtagtagtttccctcgaacgttcggccaagggaccaaggtggaaatcaaac

SEQ ID NO: 430 - DNA, 334 bp, Artificial Sequence
  Description of Artificial Sequence: Synthetic polynucleotide
cagtctgtgctgacgcagccgccctcagtgtctggggccccagggcagagggtcaccatctcctgcactgggaacagctccaacatcgggacaggttatgatgtacactggtaccagcagcttccaggaacagcccccaaactcctcatctatggtaacagcaatcggccctcaggggtccctgaccgattctctggctccaagtctggcacctcagcctccctggccatcactgggctccaggctgaggatgaggctgattattactgccagtcctatgacagcagcctgagtggttgggtgttcggcggagggaccaagctgaccgtcctag

SEQ ID NO: 431 - DNA, 328 bp, Artificial Sequence
  Description of Artificial Sequence: Synthetic polynucleotide
gacatccagatgacccagtctccatcctccctgtctgcatctgtaggagacagagtcaccatcacttgccaggcgagtcaggacattagcaactatttaaattggtatcagcagaaaccagggaaagcccctaagctcctgatctacgatgcatccaatttggaaacaggggtcccatcaaggttcagtggaagtggatctgggacagattttactttcaccatcagcagcctgcagcctgaagatattgcaacatattactgtcaacagtatgataatctcccccggcgggtcactttcggccctgggaccaaagtggatatcaaac

SEQ ID NO: 432 - DNA, 322 bp, Artificial Sequence
  Description of Artificial Sequence: Synthetic polynucleotide
gaaattgtgttgacgcagtctccaggcaccctgtctttgtctccaggggaaagagccaccctctcctgcagggccagtcagagtgttagcagcagcttcttagcctggtaccagcagaaacctggccaggctcccaggctcctcatctatggtgcatccagcagggccactggcatcccagacaggttcagtggcagtgggtctgggacagacttcactctcaccatcagcagactggagcctgaagattttgcagtgtattactgtctgcagtatggtagctcacggacgttcggccaagggaccaaggtggaaatcaaac

SEQ ID NO: 433 - DNA, 325 bp, Artificial Sequence
  Description of Artificial Sequence: Synthetic polynucleotide
gacatccagatgacccagtctccttccaccctgtctgcatctgtaggagacagagtcaccatcacttgccgggccagtcagagtattagtagctggttggcctggtatcagcagaaaccagggaaagcccctaaggtcctgatctataaggcgtctagtttagaaagtggggtcccatcaaggttcagcggcagtggatctgggacagaattcactctcaccatcagcagcctgcagcctgatgattttgcaacttattactgccaacagtataatagttattctccgctcactttcggcggagggaccaaggtggagatcaaac

SEQ ID NO: 434 - DNA, 331 bp, Artificial Sequence
  Description of Artificial Sequence: Synthetic polynucleotide
cagtctgtgttgacgcagccgccctcagtgtctgcggccccaggacagaaggtcatcatctcctgctctggaagcagctccaatattgggaataattatgtatcctggtaccagcagctcccaggaacagcccccaaactcctcatctatgaaaataataagcgaccctcagggattcctgaccgattctctggctccaagtctggcacgtcagccaccctgggcatcaccggactccagactggggacgaggccgattattactgcggaacatgggatagcagcctgaggactgacgtcttcggcggagggaccaagctgatcgtcctag

SEQ ID NO: 435 - DNA, 319 bp, Artificial Sequence
  Description of Artificial Sequence: Synthetic polynucleotide
gacatccagatgacccagtctccttccaccctgtctgcatctgtaggagacagagtcaccatcacttgccgggccagtcagagtattagtagctggttggcctggtatcagcagaaaccagggaaagcccctaagctcctgatctataaggcgtctagtttagagagtggggtcccatcaaggttcagcggcagtggatctgggacagaattcactctcaccatcagcagcctgcagcctgatgattttgcaacttattactgccaacagtatcatagttggtggacgttcggccaagggaccaaggtggaaatcaaac

SEQ ID NO: 436 - DNA, 325 bp, Artificial Sequence
  Description of Artificial Sequence: Synthetic polynucleotide
gacatccagatgacccagtctccatcctccctgtctgcatctgtaggagacagagtcaccatcacttgccggacaagtcagagcattagcagctatttaaattggtatcagcagaaaccagggaaagcccctaagctcctgatctatgctgcatccagtttgcaaagtggggtcccatcaaggttcagtggcagtggatctgggacagatttcactctcaccatcagcagtctgcaacctgaagattttgcaacttactactgtcaacagagttacagtaccctcttattcactttcggccctgggaccaaagtggatatcaaac

SEQ ID NO: 437 - DNA, 322 bp, Artificial Sequence
  Description of Artificial Sequence: Synthetic polynucleotide
gacatccagttgacccagtctccatccttcctgtctgcatctgtaggagacagagtcaccatcacttgccgggccagtcagggcattagcagttatttagcctggtatcagcaaaaaccagggaaagcccctaagctcctgatctatgctgcatccactttgcaaagtggggtcccatcaaggttcagcggcagtggatctgggacagaattcactctcacaatcagcagcctgcagcctgaagattttgcaacttattactgtcaacagcttaatagtgacccggtccctttcggcggagggaccaaggtggagatcaaac

SEQ ID NO: 438 - DNA, 322 bp, Artificial Sequence
  Description of Artificial Sequence: Synthetic polynucleotide
gacatccagatgacccagtctccatcctccctgtctgcatctgtgggagacagagtcaccatcacttgtcgggcaagtcagagcattagcaactatttaaattggtatcagcagacaccagggaaagcccctaagctcctggtctatgctacatccggtttgcaaagtggagtcccatcaaggttcactggcagtggatctgggacagatttcactctcaccatcagtagtctgcaacctggagactttgcaatttactactgtcaacagacttacagtgccccctggacgttcggccaggggaccaaggtggagatcaaac

SEQ ID NO: 439 - DNA, 325 bp, Artificial Sequence
  Description of Artificial Sequence: Synthetic polynucleotide
gaaattgtgttgacacagtctccagccaccctgtctttgtctccaggggaaagagccaccctctcctgcagggccagtcagagtgttagcagctacttagcctggtaccaacagaaacctggccaggctcccaggctcctcatctatgatgcattcaacagggccactggcatcccagccaggttcagtggcagtgggtctgggacagacttcactctcaccatcagcagcctagagcctgaagattttgcagtttattactgtcagcagcgtagcaactggccttcgctcactttcggcggagggaccaaggtcgagatcaaac

SEQ ID NO: 440 - DNA, 325 bp, Artificial Sequence
  Description of Artificial Sequence: Synthetic polynucleotide
tcctatgagctgactcagccaccgtcagtgtccgtgtccccaggacagacagccagcatcacctgctctggagataaattgggggataaatatgcttgctggtatcagcagaagccaggccagtcccctgtgctggtcatctatcaagattccaagcggccctcagggatccctgagcgattctctggctccaactctgggaacacagccactctgaccatcagcgggacccaggctatggatgaggctgactattactgtcaggcgtgggacagcagcactgcatcggtgatattcggcggagggaccaagctgaccgtcctag

SEQ ID NO: 441 - DNA, 325 bp, Artificial Sequence
  Description of Artificial Sequence: Synthetic polynucleotide
gacatccagatgacccagtctccatcctccctgtctgcatctgtaggagacagagtcaccatcacttgccgggcaagtcagagcattagcagctatttaaattggtatcagcagaaaccagggaaagcccctaagctcctgatttatgctgcatccagtttgcaaagtggggtcccatcaaggttcagtggcagtggatctgggacagatttcactctcaccatcagcagtctgcaacctgaagattttgcaacttactactgtcaacagagttacagtatcccgggactcactttcggcggagggaccaaggtggagatcaaac

SEQ ID NO: 442 - DNA, 319 bp, Artificial Sequence
  Description of Artificial Sequence: Synthetic polynucleotide
gacatccagatgacccagtctccatcttccgtgtctgcatctgtaggagacagagtcaccatcacttgtcgggcgagtcagggtattagcagctggttagcctggtatcagcagaaaccagggaaagcccctaagctcctgatctattctgcatccagtttgcaaagtggggtcccatcaaggttcagcggcagtggatctgggacagatttcactctcaccatcagcagcctgcagcctgaagattttgcaacttactattgtcaacagactaacagtttcccgtacttcggccaagggacacgactggacattaaac

SEQ ID NO: 443 - DNA, 337 bp, Artificial Sequence
  Description of Artificial Sequence: Synthetic polynucleotide
gacatcgtgatgacccagtctccagactccctggctgtgcctctgggcgagagggccaccatcaattgcaagtccagccagagtgttttatacagctccaacaataagaactacttagcttggtaccagcagaaaccaggacagcctcctaagctgctcatttactgggcatctacccgggaatccggggtccctgaccgattcagtggcagcgggtctgggacagatttcactctcaccatcagcagcctgcaggcagaagatgtggcagtttattactgtcagcaatattatagtactcggacgttcggccaagggaccaaggtggaaatcaaac

SEQ ID NO: 444 - DNA, 322 bp, Artificial Sequence
  Description of Artificial Sequence: Synthetic polynucleotide
gaaattgtgttgacgcagtctccaggcaccctgtctttgtctccaggggaaagagccaccctctcctgcagggccagtcagagtgttagcagcaactacttagcctggtaccagcagaaacctggccaggctcccaggctcctcatctacggtgcatccagcagggccactggcatcccagacaggttcagtggcagtgggtctgggacagacttcactctcaccatcagcagactggagcctgaagattttgcagtgtattactgtcagcagtatgctatctcacgaagttttggccaggggaccaagctggagatcaaac

SEQ ID NO: 445 - DNA, 334 bp, Artificial Sequence
  Description of Artificial Sequence: Synthetic polynucleotide
cagactgtggtgactcaggagccctcactgactgtgtccccaggagggacagtcactctcacctgtgcttccagcactggagcagtcaccagtggttactatccaaactggttccagcagaaacctggacaagcacccagggcactgatttatagtacaagcaataaacactcctggacccctgcccggttctcaggctccctccttgggggcaaagctgccctgacactgtcaggtgtgcagcctgaggacgaggctgagtattactgcctgctctactatggtggtgcttccggttgggtgttcggcggagggaccaagctgaccgtcctag

SEQ ID NO: 446 - DNA, 331 bp, Artificial Sequence
  Description of Artificial Sequence: Synthetic polynucleotide
cagtctgtgttgacgcagccgccctcagtgtctgcggccctaggacagaaggtcaccatctcctgctctggaagcagctccaatattgagagtaattatgtctcctggtaccaacaattcccaggaactgtccccacactcctcatctatgaaaataataagcgaccctcaggtattcctgaccgattctctgcgtccaagtttggcacgtcagccaccctgggcattagcggactccagactggggacgaggccgactattactgcggaacatgggatagaagtctgagtgcttgggtcttcggcggcgggaccaaggtgaccgtcctag

SEQ ID NO: 447 - DNA, 331 bp, Artificial Sequence
  Description of Artificial Sequence: Synthetic polynucleotide
aattttatgctgactcagccgcactctgtgtcggagtctccggggaagacggtaaccatctcctgcacccgcagcagtggcagcattgccagcaactatgtgcagtggtaccagcagcgcccgggcagtgcccccaccactgtgatctatgaggataaccaaagaccctctggggtccctgatcggttctctggctccatcgacagctcctccaactctgcctccctcaccatctctggactgaagactgaggacgaggctgactactactgtcagtcttatgatatcagcaatgtgatattcggcggagggacccagctgaccgtcctag

SEQ ID NO: 448 - DNA, 319 bp, Artificial Sequence
  Description of Artificial Sequence: Synthetic polynucleotide
gacatccagttgacccagtctccatccttcctgtctgcatctgtaggagacagagtcaccatcacttgccgggccagtcagggcattagcagttatttagcctggtatcagcaaaaaccagggaaagcccctaagctcctgatctatgctgcatccactttgcaaagtggggtcccatcaaggttcagcggcagtggatctgggacagaattcactctcacaatcagcagcctgcagcctgaagattttgcaacttattactgtcaacagcttaatagttacctcactttcggcggagggaccaaggtggagatcaaac

SEQ ID NO: 449 - DNA, 337 bp, Artificial Sequence
  Description of Artificial Sequence: Synthetic polynucleotide
cagtctgccctgactcagcctgcctccgtgtctgggtctcctggacagtcgatcaccatctcctgcactggaaccagcagtgctgttgggagttataaccttgtctcctggtaccaacagcacccaggcaaagcccccaaactcatgatttatgagggcagtaagcggccctcaggggtttctaatcgcttctctggctccaagtctggcaacacggcctccctgacaatctctgggctccaggctgaggacgaggctgattattactgctgctcatatgcaggtactagcactttagatgtggtattcggcggagggaccaagctgaccgtcctag

SEQ ID NO: 450 - DNA, 325 bp, Artificial Sequence
  Description of Artificial Sequence: Synthetic polynucleotide
gaaattgtgttgacgcagtctccaggcaccctgtctttgtctccaggggaaagagccaccctctcctgcagggccagtcagagtgttagcagcagctacttagcctggtaccagcagaaacctggccaggctcccaggctcctcatctatggtgcatccagcagggccactggcatcccagacaggttcagtggcagtgggtctgggacagacttcactctcaccatcagcagactggagcctgaagattttgcagtgtattactgtcagcagtatggtagctcacctcgcactttcggcggagggaccaaggtggagatcaaac

SEQ ID NO: 451 - DNA, 325 bp, Artificial Sequence
  Description of Artificial Sequence: Synthetic polynucleotide
gaaattgtgttgacgcagtctccaggcaccctgtctttgtctccaggggaaagagccaccctctcctgcagggccagtcagagtgttagcagcagctacttagcctggtaccagcagaaacctggccaggctcccaggctcctcatctatggtgcatccagcagggccactggcatcccagacaggttcagtggcagtgggtctgggacagacttcactctcaccatcagcagactggagcctgaagattttgcagtgtattactgtcagcagtatggtagctcaccttggacgttcggccaagggaccaaggtggaaatcaaac

SEQ ID NO: 452 - DNA, 322 bp, Artificial Sequence
  Description of Artificial Sequence: Synthetic polynucleotide
tcctatgagctgactcagccaccctcagtgtccgtgtccccaggacagacagccaccatcacctgctctggagataaattgggggataaatatgcttgctggtatcaacagaagccaggccagtcccctgtcctggtcatctatcaagataacaagcggccctcagggatccctgagcgattctctggctccaactctgggaacacagccactctgaccatcagcgagacccaggctctggatgaggctgactattactgtcaggcgtgggacagcagcactgacggggtcttcggaactgggaccaaggtcaccgtcctag

SEQ ID NO: 453 - DNA, 334 bp, Artificial Sequence
  Description of Artificial Sequence: Synthetic polynucleotide
cagtctgccctgactcagcctgcctccgtgtctgggtctcctggacagtcgatcaccatctcctgcactggaaccagcagtgacgttggtggttataactatgtctcctggtaccaacaacacccaggcaaagcccccaaactcatgatttatgatgtcagtaatcggccctcaggggtttctaatcgcttctctggctccaagtctggcaacacggcctccctgaccatctctgggctccaggctgaggacgaggctgattattactgcagctcatatacaagcagtagcactctcgatgtcttcggaactgggaccaaggtcaccgtcctag

SEQ ID NO: 454 - DNA, 322 bp, Artificial Sequence
  Description of Artificial Sequence: Synthetic polynucleotide
tcctatgagctgactcagccaccctcagtgtccgtgtccccaggacagacagccgccatcacctgctctggagataaattgggggataaatatgcttgctggtatcaacagaagccaggccagtcccctgtcctggtcatctatcaagataacaagcggccctcagggatccttgagcgattctctggctccaactctgggaacacagccactctgaccatcagcgagacccaggctctggatgaggctgactattactgtcaggcgtgggacagcagcactgacggggtcttcggaactgggaccaaggtcaccgtcctag

SEQ ID NO: 455 - DNA, 322 bp, Artificial Sequence
  Description of Artificial Sequence: Synthetic polynucleotide
gacatccagatgacccagtctccatcctccctgtctgcatctgtaggagacagagtcaccatcacttgccaggcgagtcaggacattagcaactatttaaattggtatcagcagaaaccagggaaagcccctaagctcctgatctacgatgcatccaatttggaaacaggggtcccatcaaggttcagtggaagtggatctgggacagattttactttcaccatcagcagcctgcagcctgaagatattgcaacatattactgtcaacagtatgataatctcccgtacacttttggccaggggaccaagctggagatcaaac

SEQ ID NO: 456 - DNA, 328 bp, Artificial Sequence
  Description of Artificial Sequence: Synthetic polynucleotide
gaaatagtgatgacgcagtctccagccaccctgtctgtgtctccaggggaaagagccaccctctcctgcagggccagtcagagtgttagcagcaacttagcctggtaccagcagaaacctggccaggctcccaggctcctcatctatggtgcatccaccagggccactggtatcccagccaggttcagtggcagtgggtctgggacagagttcactctcaccatcagcagcctgcagtctgaagattttgcagtttattactgtcagcagtataataactggcctcttacgtggacgttcggccaagggaccaaggtggaaatcaaac

SEQ ID NO: 457 - DNA, 325 bp, Artificial Sequence
  Description of Artificial Sequence: Synthetic polynucleotide
tcctatgtgctgactcagccaccctcagtgtcagtggccccgggaaagacggccaggattacctgtgggggagacaacattagaagtaaaagtgtacagtggtaccagcagaagccaggccaggcccctatgttggtcatctattatgatagtgaccggccctcagggatccctgagcgattctctggctccaactctgggaatacggccaccctgaccatcagcagggtcgaaggcggggatgaggccgactattattgtcaggtgtgggatagtagtggtgatcaagcggtattcggcggagggaccaagctgaccgtcctag

SEQ ID NO: 458 - DNA, 314 bp, Artificial Sequence
  Description of Artificial Sequence: Synthetic polynucleotide
cagtctgtgttgacgcagccccctaagacagaaggtcaccatctcctgctctggaagcagctccaatattgagagtaattatgtctcctggtaccaacaattcccaggaactgtccccacactcctcatctatgaaaataataagcgaccctcaggtattcctgaccgattctctgcgtccaagtttggcacgtcagccaccctgggcattagcggactccagactggggacgaggccgactattactgcggaacatgggatagaagtctgagtgcttgggtcttcggcggcgggaccaaggtgaccgtcctag

SEQ ID NO: 459 - DNA, 325 bp, Artificial Sequence
  Description of Artificial Sequence: Synthetic polynucleotide
gaaattgtgttgacgcagtctccagacaccctgtctttgtctccaggggaaagagccaccctctcctgcggggccagtcagagaattagaagcaactacttagcctggtaccagcagaaacctggccaggctcccaggctcctcatttatgctacatccaccagggccactggcatcccagacaggttcagtggcagtgggtctgggacagacttcactctcatcatcagcagactggagcctgaagattttgccgtgtattactgtcagcagtatggtagctctcagtggacgttcggccaagggaccaaggtggaaatcaaac

SEQ ID NO: 460 - DNA, 322 bp, Artificial Sequence
  Description of Artificial Sequence: Synthetic polynucleotide
gacatccagatgacccagtctccatcttccgtgtctgcatctgtgggagacagagtcaccctcacttgtcgggcgagtcagggtattagtagttggttagcctggtatcagcagaagccagggaaagcccctaagttgctgatctatattgcatccagtttgcaaagtggggtcccatcaaggttcagcggcagtggatctgggacagagttcactctcaccatcagcagcctgcagcctgaagattttgcaacttactattgtcaacaggcgaggacattcccgtacacttttggccaggggaccaagctggagatcagac

SEQ ID NO: 461 - DNA, 322 bp, Artificial Sequence
  Description of Artificial Sequence: Synthetic polynucleotide
gccatccagatgacccagtctccatcctccctgtctgcatctgttggagacagagtcaccatcacttgccgggcaagtcaggtcattagaaatgatttaggctggtatcaacagaaaccaggtaaagcccctaaactcctaatgtttgctgcatccactttgcaaagtggggtcccatcaagattcagcggcagtggttctggcacagatttcactctcaccatcagcagcctgcagcctgaagattccgcaacttattactgtctccaagattacaattaccctcggacgttcggccaggggaccaaggtggaaatcaaac

SEQ ID NO: 462 - DNA, 334 bp, Artificial Sequence
  Description of Artificial Sequence: Synthetic polynucleotide
cagtctgccctgactcagcctcgctcagtgtccgggtctcctggacagtcagtcaccatctcctgcactggaaccagcagtgatgttggtggttataactatgtctcctggtaccaacagcacccaggcaaagccccccaactcatgatttatgatgtcattaagcggccctcaggggtccctgatcgcttctctggctccaagtctggcaacacggcctccctgaccatctctgggctccaggctgaggatgaggctgattattactgctgctcatatgcaggcagctacatcttttatgtcttcggaactgggaccaaggtcaccgtcctag

SEQ ID NO: 463 - DNA, 322 bp, Artificial Sequence
  Description of Artificial Sequence: Synthetic polynucleotide
gacatccagatgacccagtctccatcctccctgtctgcatctgtaggagacagagtcaccatcacttgccaggcgagtcaggacattagcaactatttaaattggtatcagcagaaaccagggaaagcccctaagctcctgatctacgatgcatccaatttggaaacaggggtcccatcaaggttcagtggaagtggatctgggacagattttactttcaccatcagcagcctgcagcctgaagatattgcaacatattactgtcaacagtatgataatctccttctcactttcggcggagggaccaaggtggagatcaaac

SEQ ID NO: 464 - DNA, 325 bp, Artificial Sequence
  Description of Artificial Sequence: Synthetic polynucleotide
gccatccagatgacccagtctccatcctccctgtctgcatctgtaggagacagagtcaccatcacttgccgggcaagtcaggacattaaaaatgatttagcctggtatcagcagagaccagggaaagcccctaacctcctgatctatgctgcatccagtttacaaactggggtcccatcaaggttcagcggcagtgggtctggcacagacttcactctcaccatcagcagcctgcagcctgaagattttgcaacttattactgtctacaagattacgattttcctccctacacttttggccaggggaccaagctggagatcaaac

SEQ ID NO: 465 - DNA, 325 bp, Artificial Sequence
  Description of Artificial Sequence: Synthetic polynucleotide
gccatccagatgacccagtctccatcctccctgtctgcatctgtaggagacagagtcaccatcacttgccggtcaagtcaggacattaaaaatgatttagcctggtatcagcagagaccagggaaagcccctaacctcctgatctatgctgcatccagtttacaaactggggtcccatcaaggttcagcggcagtggatctggcacagacttcactctcaccatcagcagcctgcagcctgaagattttgcaacttattactgtctacaagattacgatttccctccgtacacttttggccaggggaccaagttggagatcaaac

SEQ ID NO: 466 - DNA, 273 bp, Artificial Sequence
  Description of Artificial Sequence: Synthetic polynucleotide
gaaacgacactcacgcagtctctcctcttaataaggtaccatctctcatccccctccagcaccaaccatctgtcttcatcttcccagactgtgcgtgtccatccccctctgaaaagaattggacactacaaagtcctttcatagcaacgaggtcccatggatgcctgatttgccctcggtccacaaccttctccaccaggccagacaaagaccacggtggaaatctcagtcctttgtgtagttggggaggaaaacaggctctgtctacaagga

SEQ ID NO: 467 - DNA, 333 bp, Artificial Sequence
  Description of Artificial Sequence: Synthetic polynucleotide
cagtctgtgttgacgcagccgccctcagtgtctgcggccccaggacagaaggtcaccatctcctgctctggaagcagctccaacattgggaataattatgtatcctggtaccagcagctcccaggaacagcccccaaactcctcatctatgaaaataataagcgaccctcagggattcctgaccgattctctggctccaagtctggcacgtcagccaccctgggcatcaccggactccagactggggacgaggccgattattactgcggaacatgggatagcagcctgagtgcggcacggtattcggcggagggaccaagctgaccgtcctag

SEQ ID NO: 468 - DNA, 319 bp, Artificial Sequence
  Description of Artificial Sequence: Synthetic polynucleotide
tcctatgagctgactcagccaccctcagtgtccgtgtccccaggacagacagccagcatcacctgctctggagataaattgggggataaatatgcttgctggtatcagcagaagccaggccagtcccctgtgctggtcatctatcaagatagcaagcggccctcagggatccctgagcgattctctggctccaactctgggaacacagccactctgaccatcagcgggacccaggctatggatgaggctgactattactgtcaggcgtgggacagtagaattgtcgtgttcggaggaggcacccagctgaccgtcctcg

SEQ ID NO: 469 - DNA, 325 bp, Artificial Sequence
  Description of Artificial Sequence: Synthetic polynucleotide
tcttctgagctgactcaggaccctgctgtgtctgtggccttgggacagacagtcaccatcacatgccggggagacagcctcagaacctcttatgcaagctggtaccagcagaagccaggacaggcccctgttcttgccatttatggcaagaacaaccggccctcggggatcccagaccgcttctctggctcctactcaggaagtatagcttccttgaccatcactggggctcaggcggaagatgaggctgactattactgtaactcccgggacagcagtggagaccatgtcccattcggcggagggaccaggctgaccgtcctaa

SEQ ID NO: 470 - DNA, 319 bp, Artificial Sequence
  Description of Artificial Sequence: Synthetic polynucleotide
gacatccagatgacccagtctccttccaacctgtctgcatctgtaggagacagagtcataatcacttgccgggccagtcagactatcagtagctggttggcctggtatcagcagaaaccagggaaagcccctaacctcctgatctatgaggcgtctagtttagaaagtggggtcccagcaaggttcagcggcagtggatctgggacagaattcactctcaccatcaacggcctgcagcctgatgactttgcaacttattactgccaacagtatgatacttattggacgttcggccaagggaccaaggtggaaatcaaac

SEQ ID NO: 471 - DNA, 332 bp, Artificial Sequence
  Description of Artificial Sequence: Synthetic polynucleotide
cagtctgccctgactcagcccctctctgtgtcggggtccccgggagaagaaatcaatgtcccctccactgagaaacccttttatggggagagttataattgtgtctcgtgacaccaagaccccccgggcagccccccaaaactttaaatttaaagagggaaaaaaacaccctcctgggggggtttgaaatcttttctcgggccccaaatcgggcaacccctcctccctgaccacctgtgggctagaggaggaagaagaggatgattattgctgctgctcatatggaagaagccatgtattattcggcggagggagcaagaagaacgtcctac

SEQ ID NO: 472 - DNA, 319 bp, Artificial Sequence
  Description of Artificial Sequence: Synthetic polynucleotide
gaaattgtgttgacacagtctccagccaccctgtctttgtctccaggggaaagagccaccctctcctgcagggccagtcagagtgttagcagctacttagcctggtaccaacagaaacctggccaggctcccaggctcctcatctatgatgcatccaacagggccactggcatcccagccaggttcagtggcagtgggtctgggacagacttcactctcaccatcagcagcctagagcctgaagattttgcagtttattactgtcagcagcgtcgcaaccgagggacttttggccaggggaccaagctggtgatcaaac

SEQ ID NO: 473 - DNA, 334 bp, Artificial Sequence
  Description of Artificial Sequence: Synthetic polynucleotide
cagtctgtgctgactcagccaccctcagtctctgggacccccgggcagagggtcaccatctcttgttctgggagcagctccaatatcggaggtaattttgtatactggtatcagcaattcccaggaacggcccccaaactcctcatctatttgaattaccggcggccctcaggggtccctgaccgattctctggctccaactctggcacctcagcctccctggccatcagtgggctccggtccgaggatgaggctgaatattactgtgctacatgggatgacagcctgagtggtcagaaagttttcggaactgggaccaaggtcaccgtcctag

SEQ ID NO: 474 - DNA, 331 bp, Artificial Sequence
  Description of Artificial Sequence: Synthetic polynucleotide
cagtctgtgctgactcagccaccctcagcgtctgggacccccgggcagagggtcaccatctcttgttctggaagcagctccaacatcggacgtaattctgtaaactggtaccagcagctcccaggaacggcccccaaactcctcatctatagtaataatcagcggccctcaggggtccctgaccgattctctggctccaagtctggcacctcagcctccctggccatcagtgggctccagtctgaggctgacgctgattatttctgtgcagcatgggatgacagcctgaatggttgggtgttcggcggagggaccaagctgaccgtcctag

SEQ ID NO: 475 - DNA, 228 bp, Artificial Sequence
  Description of Artificial Sequence: Synthetic polynucleotide
cagcctgtgctgactcaatccatactatatttcgccgattgatagaatgaaacacttctgtgtttgggggtaatatttatttctctggacaccacagtacccgggtgatctctccgtatcttcgtctaatgcgacgtcctcccgtagctccgagttttgtcagatgttttgtcggggactgttctggagttttgtctgctgtgagtcttgggcttaatctggagtatt

SEQ ID NO: 476 - DNA, 328 bp, Artificial Sequence
  Description of Artificial Sequence: Synthetic polynucleotide
tcctatgtgctgactcagccaccctcagtgtcagtggccccaggaaagacggccaggattacctgtggggaaaacaacattggaagtaaaagtgtgcactggtaccagcagaagccaggccaggcccctgtgctggtcatctattatgatagcgaccggccctcagggatccctgagcgattctctggctccaactctgggaacacggccaccctgaccatcagcagggtcgaagccggggatgaggccgactattactgtcacgtgtgggatagtagtagtggtcatccgcgggtcttcggaactgggaccaaggtcaccgtcctag

SEQ ID NO: 477 - DNA, 322 bp, Artificial Sequence
  Description of Artificial Sequence: Synthetic polynucleotide
gaaattgtgctgactcagtctccagactttcagtctgtgagtccaaacgagaaagtcaccatcacctgccgggccagtcagagcattagtagtagcttacactggtaccagcagaagccagatcagtctccaaagctcctcatcaagtatgcttcccagtccctctcaggggtcccctcgaggttcagtggcagtggatctgggacagatttcaccctcaccatcaatagcctggaagttgaagatggtgcaacgtattactgtcatcagagtagtagtttccctcgaacgttcggccaagggaccaaggtggaaatcaaac

SEQ ID NO: 478 - DNA, 322 bp, Artificial Sequence
  Description of Artificial Sequence: Synthetic polynucleotide
gaaatagtgatgacgcagtctccagccaccctgtctgtgtctccaggggaaagagccaccctctcctgcagggccagtcagagtgttagcagcaacttagcctggtaccagcagaaacctggccaggctcccaggctcctcatctatggtgcatccaccagggccactggtatcccagccaggttcagtggcagtgggtctgggacagagttcactctcaccatcagcagcctgcagtctgaagattttgcagtttattactgtcagcactattataactggccacggacgttcggccaagggaccaaggtggaagtcaaac

SEQ ID NO: 479 - DNA, 331 bp, Artificial Sequence
  Description of Artificial Sequence: Synthetic polynucleotide
aattttatgctgactcagccccactctgtgtcggagtctccggggaagacggtaaccatctcctgcaccggcagcagtggcagcattgccagcaactatgtgcagtggtaccagcagcgcccgggcagtgcccccaccactgtgatctatgaggataaccaaagaccctctggggtccctgatcggttctctggctccatcgacagctcctccaactctgcctccctcaccatctctggactgaagactgaggacgaggctgactactactgtcagtcttatgataacagcttctgggtgttcggcggagggaccaagctgaccgtcctag

SEQ ID NO: 480 - DNA, 325 bp, Artificial Sequence
  Description of Artificial Sequence: Synthetic polynucleotide
gacatccagttgacccagtctccatccttcctgtctgcatctgtaggagacagagtcaccatcacttgccgggccagtcagggcattaacagttatttagcctggtatcagcaaaaaccagggaaagcccctaagctcctgatctatgctgcatccactttgcaaagtggggtcccatcaaggttcagcggcagtggatctgggacagaattcactctcacaatcagcagcctgcagcctgcagattttgcaacttattactgtcaacaacttgatagttaccctccattcactttcggccctgggaccaaagtggatatcaaac

SEQ ID NO: 481 - DNA, 334 bp, Artificial Sequence
  Description of Artificial Sequence: Synthetic polynucleotide
caggctgtggtgactcaggagccctcactgactgtgtccccaggagggacagtcactctcacctgtggctccagcactggagctgtcaccagtggtcattatccctactggttccagcagaagcctggccaagcccccaggacactgatttatgatacaagcaacaaacactcctggacccctgcccggttctcaggctccctccttgggggcaaagctgccctgaccctttcgggtgcgcagcctgaggatgaggctgagtattactgcttgctctcctatagtggtgctcggtatgtggtattcggcggagggaccaagctgaccgtcctag

SEQ ID NO: 482 - DNA, 322 bp, Artificial Sequence
  Description of Artificial Sequence: Synthetic polynucleotide
gacatccagatgacccagtctccatctgctgtctctgcatctgttggagacagagtcaccatcacttgtcgggcgagtcagggtattcgcggcggcttagcctggtatcagcagattcccgggaaagcccctaaactcctgatctatggtgcatctactttacaaagtggggtcccatcccggtttagtggccgtggatctggtacagagtttactctcaccatcagcagcctgcagcctgaagattttgcagtttaccattgtcaacagggtgacagtttcccgtacagttttggccaggggaccaagttggagatcaagc

SEQ ID NO: 483 - DNA, 334 bp, Artificial Sequence
  Description of Artificial Sequence: Synthetic polynucleotide
cagtctgccctgactcagcctcgctcagtgtccgggtctcctggacagtcagtcaccatctcctgcactggaaccagcagtgatgttggtggttataactatgtctcctggtaccaacagcacccaggcaaagcccccaaactcatgatttatgatgtcagtaagcggccctcaggggtccctgatcgcttctctggctccaagtctggcaacacggcctccctgaccatctctgggctccaggctgaggatgaggctgattattactgctgctcatatgcaggcagctacacttattatgtcttcggaactgggaccaaggtcaccgtcctag

SEQ ID NO: 484 - DNA, 325 bp, Artificial Sequence
  Description of Artificial Sequence: Synthetic polynucleotide
tcctatgtgctgactcagccaccctcagtgtcagtggccccgggaaagacggccaggattacctgtgggggagacaacattagaactaaaagtgtacaatggtaccagcagaagccaggccaggcccctatgttggtcatctattatgatagcgaccggccctcagggatccctgagcgattctctggctccaactctgggaacacggccaccctgaccatcagcagggtcgaaggcggggatgaggccgactattactgtcaggtgtgggatagtagtggtgatcaagcggtattcggcggagggaccaagctgaccgtcctag

SEQ ID NO: 485 - DNA, 325 bp, Artificial Sequence
  Description of Artificial Sequence: Synthetic polynucleotide
tcctatgagctgacacagccactctcggtggcagtggccccaggagagacggccaggatcacctgttctggagatgcattgtcagaggaatatactcactggtaccagcagaggccaggccaggcccctgttttgattatatataaggacactgagaggccctcagggatccctgagcgattctctggctccacctcagggacaacagtcacgttgaccatcagtggagtccaggcagaagacgaggctgactattattgtcaatcaccggacaccacttctacttatcgggtcttcggcggagggaccaagctggccgtcctag

SEQ ID NO: 486 - DNA, 331 bp, Artificial Sequence
  Description of Artificial Sequence: Synthetic polynucleotide
cagtctgtgctgactcagccaccctcggtgtctgaagcccccaggcagagggtcaccatctcctgttctggaagcagctccaacatcggaaacaatgttgttaactggtaccagcagctcccaggaaaggctcccaaactcctcatctattatgatgatctgctgccctcaggggtctctgaccgattctctggctccaagtctggcacctcagcctccctggccatcagtgggctccagtctgaggatgaggctgattattactgtgcatcatgggatgacagcctgaatggtccggtcttcggcggagggaccaagctgaccgtcctag

SEQ ID NO: 487 - DNA, 337 bp, Artificial Sequence
  Description of Artificial Sequence: Synthetic polynucleotide
gatattgtgatgactcagtctccactctccctgcccgtcacccctggagagccggcctccatctcctgcaggtctagtcagagcctcctgcatagtaatggatacaactatttggattggtacctgcagaagccagggcagtctccacagctcctgatctatttgggttctaatcgggcctccggggtccctgacaggttcagtggcagtggatcaggcacagattttacactgaaaatcagcagagtggaggctgaggatgttggggtttattactgcatgcaagctctacaaactcctctcactttcggcggagggaccaaggtggagatcaaac

SEQ ID NO: 488 - DNA, 334 bp, Artificial Sequence
  Description of Artificial Sequence: Synthetic polynucleotide
aattttatgctgactcagccccactctgtgtcggagtctccggggaagacggtaaccatctcctgcaccggcagcagtggcagcattgccagcaactatgtgcagtggtaccagcagcgcccgggcagtgcccccaccactgtgatctatgaggataaccaaagaccctctggggtccctgatcggttctctggctccatcgacagctcctccaactctgcctccctcaccatctctggactgaagactgaggacgaggctgactactactgtcagtcttatgatagcagcacctattgggtgttcggcggagggaccaagctgaccgtcctag

SEQ ID NO: 489 - DNA, 322 bp, Artificial Sequence
  Description of Artificial Sequence: Synthetic polynucleotide
gacatccagatgacccagtctccatcctccctgtctgcatctgtaggagacagagtcaccatcacttgccgggcaagtcagaacattagcaactatttaaattggtatcagcagaaaccaaggaaagcccctaacctcctgatctatgccgcatccagtttgcaaagtggggtcccatcaaggttcagtggcagtggatctgggacagatttcactctcaccatcaacagtctgcaacctgaagattttgccacttactattgtcaacagagttacaatgctcctcggacgttcggccaagggaccaaggtggaaatcacac

SEQ ID NO: 490 - DNA, 322 bp, Artificial Sequence
  Description of Artificial Sequence: Synthetic polynucleotide
gaaattgtgttgacgcagtctcccggcaccctgtctttgtctccaggggaaagagccaccctctcctgcagggccagtcagagtgttagcagcagctacttagcctggtaccagcagaaacctggccaggctcccaggctcctcatctatggtgcatccagcagggccactggcatcccagacaggttcagtggcagtgggtctgggacagacttcactctcaccatcagcagactggagcctgaagattttgcagtgtattactgtcagcagtatggtagctcacggacgttcggccaagggaccaaggtggaaatcaaac

SEQ ID NO: 491 - DNA, 331 bp, Artificial Sequence
  Description of Artificial Sequence: Synthetic polynucleotide
cagtctgccctgactcagcctccctccgcgtccgggtctcctggacagtcagtcaccatctcctgcactggaaccagcagtgacgttggtgtttataagtatgtctcctggtaccaacaccacccaggcaaagcccccaaactcatgctttatgaggtcagtaagcggccctcaggggtccctgatcgcttctctggctccaagtctggcaacacggcctccctgaccgtctctgggctccaggctgaggatgaggctgattattactgcacctcatatgaaggcgacaacactttggtgttcggcggagggaccaagctgaccgtcctag

SEQ ID NO: 492 - DNA, 328 bp, Artificial Sequence
  Description of Artificial Sequence: Synthetic polynucleotide
gacatccagttgacccagtctccatccttcctgtctgcatctgtaggagacagagtcaccatcacttgccgggccagtcagggcattggcagttatttagcctggtatcagcaaaaaccagggaaagcccctaagctcctgatctatgcttcatccactctgcaaggtggggtcccatcaaggttcagcggcagtggatctgggacagaattcactctcacaatcagcagcctgcagcctgaagattttgcaacttattactgtcaacaccttaatacttaccctccttcgctcactttcggcggagggaccaaggtggagatcaaac

SEQ ID NO: 493 - DNA, 330 bp, Artificial Sequence
  Description of Artificial Sequence: Synthetic polynucleotide
cagtctgtgctgactcagccaccctcagcgtctgggacccccgggcagagggtcaccatctcttgttctggaagcagctccaacatcggaagtaatcctgtaaactggtaccagcagctcccaggaacggcccccaaactcctcatctatagtaataatcagcggccctcaggggtccctgaccgattctctggctccaagtctggcacctcagcctccctggccatcagtgggctccagtctgaggatgaggctgattattactgtgcagcatgggatgacagcctgaatggtgggtgttcggcggagggaccaagctgaccgtcctag

SEQ ID NO: 494 - DNA, 322 bp, Artificial Sequence
  Description of Artificial Sequence: Synthetic polynucleotide
gacatccagttgacccagtctccatccttcctgtctgcatctgtaggagacagagtcaccatcacttgccgggccagtcagggcattagcagttatttagcctggtatcagcaaaaaccagggaaagcccctaagctcctgatctatgctgcatccactttgcaaagtggggtcccatcaaggttcagcggcagtggatctgggacagaattcactctcacaatcagcagcctgcagcctgaagattttgcaacttattactgtcaacagcttaatagttacccgatcaccttcggccaagggacacgactggagattaaac

SEQ ID NO: 495 - DNA, 325 bp, Artificial Sequence
  Description of Artificial Sequence: Synthetic polynucleotide
gacatccagttgacccagtctccatccttcctgtctgcatctgtaggagacagagtcaccatcacttgccgggccagtcagggcattagcagttatttagcctggtatcagcaaaaaccagggaaagcccctaagctcctcatctatgctgcatccactttgcaaagtggggtcccatcaaggttcagcggcagtggatctgggacagaattcactctcacaatcagcagcctgcagcctgaagattttgcaacttattactgtcaacagcttaatagttaccctcccatcaccttcggccaagggacacgactggagattaaac

SEQ ID NO: 496 - DNA, 322 bp, Artificial Sequence
  Description of Artificial Sequence: Synthetic polynucleotide
gacatccagatgacccagtctccatcctccctgtctgcatctgtaggagacagagtcaccatcacttgccgggcaagtcagagcattagcagctatttaaattggtatcagcagaaaccagggaaagcccctaagctcctgatctatgctgcatccagtttgcaaagtggggtcccatcaaggttcagtggcagtggatctgggacagatttcactctcaccatcagcagtctgcaacctgaagattttgcaacttactactgtcaacagagttacagtatacctcgaactttcggcggagggaccaaggtggagatcaaac

SEQ ID NO: 497 - DNA, 322 bp, Artificial Sequence
  Description of Artificial Sequence: Synthetic polynucleotide
tcctatgtgctgactcagccaccctcagtgtcagtggccccaggaaagacggccaggattacctgtgggggaaacaacattggaagtaaaagtgtgcactggtaccagcagaagccaggccaggcccctgtgctggtcatctattatgatagcgaccggccctcagggatccctgagcgattctctggctccaactctgggaacacggccaccctgaccatcagcagggtcgaagccggggatgaggccgactattactgtcaggtgtgggatagtagtagtgatccggtgttcggcggagggaccaagctgaccgtcctag

SEQ ID NO: 498 - DNA, 337 bp, Artificial Sequence
  Description of Artificial Sequence: Synthetic polynucleotide
cagtctgtgctgacgcagccgccctcagtgtctggggccccagggcagagggtcaccatctcctgcactgggagcagctccaacatcggggcaggttatgatgtacactggtaccagcagcttccaggaacagcccccaaactcctcatctatggtaacaacaatcggccctcaggggtccctgaccgattctctggctccaagtctggcacctcagcctccctggccatcactgggctccaggctgaggatgaggctgattattactgccagtcctttgacagcagcctgagtgaccatgtggtattcggcggagggaccaagctgaccgtcctag

SEQ ID NO: 499 - DNA, 331 bp, Artificial Sequence
  Description of Artificial Sequence: Synthetic polynucleotide
cagtctgtgctgactcagccaccctcagcgtctgggacccccgggcagagggtcaccatctcttgttctggaagcagctccaacatcggaagtaatactgtaaactggtaccagcaactcccaggaacggcccccaaactcctcatctatagtaataatcagcggccctcaggggtccctgaccgattctctggctccaagtctggcacctcagcctccctggccatcagtgggctccagtctgaggatgaggctgattattactgtgcagcatgggatgacagcctgaatggttatgtcttcggaactgggaccaaggtcaccgtcctag

SEQ ID NO: 500 - DNA, 322 bp, Artificial Sequence
  Description of Artificial Sequence: Synthetic polynucleotide
gaaattgtgctgactcagtctccagactttcagtctgtgagtccaaacgagaaagtcaccatcacctgccgggccagtcagagcattggtggtagcttacactggtaccagcagaagccagatcagtctccaaagctcctcatcaagtatgcttcccagtccctctcaggggtcccctcgaggttcagtggcagtggatctgggacagatttcaccctcaccatcaatagcctggaagttgaagatggtgcaacgtattactgtcatcagagtagtagtttccctcgaacgttcggccaagggaccaaggtggaaatcaaac

SEQ ID NO: 501 - DNA, 340 bp, Artificial Sequence
  Description of Artificial Sequence: Synthetic polynucleotide
gatattgtgatgacccagactccactctcctcacctgtcacccttggacagccggcctccatctcctgcaggtctagtcaaagcctcgtacacagtgatggaaacacctacttgagttggcttcagcagaggccaggccagcctccaagactcctaatttataagatttctaaccggttctctggggtcccagacagattcagtggcagtggggcagggacagatttcacactgaaaatcagcagggtggaagctgaggatgtcggggtttattactgcatgcaaggtacacaatttcctcaggtcaccttcggccaagggacacgactggagattaaac

SEQ ID NO: 502 - DNA, 331 bp, Artificial Sequence
  Description of Artificial Sequence: Synthetic polynucleotide
cagtctgccctgactcagcctccctccgcgtccgggtctcctggacagtcagtcaccatctcctgcactggaaccagcagtgacgttggtgtttataagtatgtctcctggtaccaacaccacccaggcaaagcccccaaactcatggtttatgaggtcagtaagcggccctcaggggtccctgatcgcttctctggctccaagtctggcaacacggcctccctgaccgtctctgggctccaggctgaggatgaggctgattattactgcacctcatatgaaggcgacaacactttggtgttcggcggagggaccaagctgaccgtcctag

SEQ ID NO: 503 - DNA, 322 bp, Artificial Sequence
  Description of Artificial Sequence: Synthetic polynucleotide
gacatccagatgacccagtctccatcctccctgtctgcatctgtaggagacagagtcaccttcacttgccgggcaagtcagaacattagcagctatttaaattggtatcagcataaaccagggaaagcccctaagctcctgatctatggtgcatccagtttgcaaagtggggtcccatcaagggtcagtggcagtggatctgggacagatttcactctcaccatcagcagtctgcaacctgaagattttgcaacttactactgtcaacagagttacagtagccctcggacgttcggccaagggaccaaggtagaaatcaaac

SEQ ID NO: 504 - DNA, 331 bp, Artificial Sequence
  Description of Artificial Sequence: Synthetic polynucleotide
cagtctgccctgactcagcctgcctccgtgtctgggtctcctggacagtcgatcaccatctcctgcactggaaccagcagtgacgttggtggttataactatgtctcctggtaccaacaacacccaggcaaagcccccaaactcatgatttatgatgtcagtaatcggccctcaggggtttctaatcgcttctctggctccaagtctggcaacacggcctccctgaccatctctgggctccagggtgaggacgaggctgattattactgcagctcatatacaagcagcagcactcgggtattcggcggagggaccaagctgaccgtcctag

SEQ ID NO: 505 - DNA, 322 bp, Artificial Sequence
  Description of Artificial Sequence: Synthetic polynucleotide
gacatccagatgacccagtctccatcctccctgtctgcatctgtaggagacagagtcaccatcacttgccgggcgagtcagggcattagcaattatttagcctggtatcagcagaaaccagggaaagttcctaagctcctgatctatggtgcatcgactttgcaatcaggggtcccatctcggttcagtggcagtggatctgggacagatttcgctctcaccatcagcggcctgcagactgaagatgttgcaacttattactgtcaaaagtataacagtgccctattcactttcggccctgggaccaaagtgaatatcaaac

SEQ ID NO: 506 - DNA, 325 bp, Artificial Sequence
  Description of Artificial Sequence: Synthetic polynucleotide
tcctatgtgctgactcagccaccctcagtgtcagtggccccaggaaagacggccaggattacctgtgggggaaacaacattggatataaaagtgtgcactggtaccagcagaagccaggccaggcccctgtgctggtcatctattatgatagcgaccggccctcagggatccctgagcgattctctggctccaactctgggaacacggccaccctgaccatcagcagggtcgaagccggggatgaggccgactattactgtcaggtgtgggatagtagtagtgatcattgggtgttcggcggagggaccaagctgaccgtcctag

SEQ ID NO: 507 - DNA, 325 bp, Artificial Sequence
  Description of Artificial Sequence: Synthetic polynucleotide
gaaattgtgttgacgcagtctccaggcaccctgtctttgtctccaggggaaagagccaccctctcctgcagggccagtcagagtgttagcagcagctacttagcctggtaccagcagaaacctggccaggctcccaggctcctcatctatggtgcatccagcagggccactggcatcccagacaggttcagtggcagtgggtctgggacagacttcactctcaccatcagcagactggagcctgaagattttgcagtgtattactgtcagcagtatggtagctcatcgtggacgttcggccaagggaccaaggtggaaatcaaac

SEQ ID NO: 508 - DNA, 328 bp, Artificial Sequence
  Description of Artificial Sequence: Synthetic polynucleotide
tcctatgagctgacacagccaccctcggtgtcagtgtccccaggacaaacggccaggatcacctgctctggagatgcattgccaaaaaaatatgcttattggtaccagcagaagtcaggccaggcccctgtgctggtcatctatgaggacagcaaacgaccctccaggatccctgagagattctctggctccagctcagggacaatggccaccttgactatcagtggggcccaggtggaggatgaagctgactactactgttactcaacagacagcagtattaatcatagcggggtattcggcggagggaccaagctgaccgtcctag

SEQ ID NO: 509 - DNA, 325 bp, Artificial Sequence
  Description of Artificial Sequence: Synthetic polynucleotide
tcctatgagctgacacagccaccctcggtgtcagtgtccccaggacagacggccaggatcacctgctctggagatgcattgccaaagcaatatggttattggtaccaacagaagccaggccaggcccttgtgttggtgatatataaagacagtgagaggccctcagggatctctgagcgattctctggctccagctcagggacaacagtcacgttgaccatcagtggagtccaggcagaagacgaggctgactattactgtcaatcagcagacagcagtgctacttatccggtgttcggcggagggaccaagctgaccgtcctag

SEQ ID NO: 510 - DNA, 322 bp, Artificial Sequence
  Description of Artificial Sequence: Synthetic polynucleotide
gacatccagatgacccagtctccatcctccctgtctgcatctgtaggagacagagtcaccatcacttgccgggcaagtcagggcattagaaatgatttaggctggtttcagcagaaaccagggaaagcccctaagcgcctgatctatgctgcatccagtttgcaaagtggggtcccatcaaggttcagcggcagtggatctgggacagaattcactctcacaatcagcagcctgcagcctgaagattttgcaacttattactgtctacagcataatagttaccccatcaccttcggccaagggacacgactggagattaaac

SEQ ID NO: 511 - DNA, 334 bp, Artificial Sequence
  Description of Artificial Sequence: Synthetic polynucleotide
cagtctgccctgactcagcctccctccgcgtccgggtctcctggacagtcagtcaccatctcctgcactggaaccagcagtgacgttggtggttataactatgtctcctggtaccaacaacacccaggcaaagcccccaaactcatgatttatgaggtcagtaagcggccctcaggggtccctgatcgcttctctggctccaagtctggcaacacggcctccctgaccgtctctgggctccaggctgaggatgaggctgattattactgcagctcatatgcaggcagtaacaacccttatgtcttcggaactgggaccaaggtcaccgtcctag

SEQ ID NO: 512 - DNA, 325 bp, Artificial Sequence
  Description of Artificial Sequence: Synthetic polynucleotide
gaaattgtgttgacgcagtctccaggcaccctgtctttgtctccaggggaaagagcctccctctcctgcagggccagtcagagtgttaccagcagctacttaacctggtaccagcagaaacctggccaggctcccaggctcctcatctttggtgcatccagcagggccactggcatcccagacaggttcagtggcagtgggtctgggacagacttcactctcaccatcagcagactggagcctgaagattttgcagagtattactgtcagcactatggcaaccccctattcactttcggccaagggaccaaaatagatatcgaag

SEQ ID NO: 513 - DNA, 331 bp, Artificial Sequence
  Description of Artificial Sequence: Synthetic polynucleotide
cagtctgccctgactcagcctgcctccgtgtctgggtctcctggacagtcgatcaccatctcctgcactggaaccagcagtgatgttgggagttataaccttgtctcctggtaccaacagcacccaggcaaagcccccaaactcatgatttatgaggtcaataagcggccctcaggggtttctaatcgcttctctggctccaagtctggcaacacggcctccctgacaatctctgggctccaggctgaggacgaggctgattattactgctgctcatatggaggtagtagtacttgggtattcggcggagggaccaagttgaccgtcctag

SEQ ID NO: 514 - DNA, 325 bp, Artificial Sequence
  Description of Artificial Sequence: Synthetic polynucleotide
tcctatgagctgacacagccaccctcggtgtcagtgtccccaggacagacggccaggatcacctgctctggagatgcattgccaaagcaatttgcttattggtaccagcagaagccaggccaggcccctgtggtgctgatatataaagacagtgagaggccctcagggatccctgagcgaatctctggctccagctcagggacaacagtcacgctgaccatcagtggagtcgaggcagaggacgaggctgactattactgtcaatcagcagacagcagtggtacttatgtggtgttcggcggagggaccaagctgaccgtcctag

SEQ ID NO: 515 - DNA, 313 bp, Artificial Sequence
  Description of Artificial Sequence: Synthetic polynucleotide
gaaattgtgttgacacagtctccagccaccctgtctttgtctccaggggaaagagccaccctctcctgcagggccagtcagagtgttagcagctacttagcctggtaccaacagaaacctggccaggctcccaggctcctcatctatgatgcatccaacagggccactggcatcccagccaggttcagtggcagtgggtctgggacaaacttcactctcaccatcagcagcctagagcctgaagattatgcagtttattactgtcagcaccgtagcaactccttcggccaagggacacgactggagattaaac

SEQ ID NO: 516 - DNA, 334 bp, Artificial Sequence
  Description of Artificial Sequence: Synthetic polynucleotide
cagtctgccctgactcagcctccctccgcgtccgggtctcctggacagtcagtcaccatctcctgcactggaaccagcagtgacgttggtggttataactatgtctcctggtaccaacagcacccgggcaaagcccccaaactcatgatttatgaggtcactaagcggccctcacgggtccctgatcgcttctctgcctccaagtctggcaacacggcctccctgaccgtctctgggctccaggctgaggatgaggctgattattactgcagctcatatgcaggcagcaacaacccttatgtcttcggacctgggaccaaggtcaccgtcctag

SEQ ID NO: 517 - DNA, 325 bp, Artificial Sequence
  Description of Artificial Sequence: Synthetic polynucleotide
cagtctgccctgactcagcctccctccgcgtccgggtctcctggacagtcagtcaccatctcctgcactggatccagcagtgacgttggtggtttttactatgtctcctggtaccaacagcacccaggcaaagcccccaaactcttgatttatgaggtcactaagcggccctcaggggtccctgatcgcttctctggctccaagtctggcaacacggcctccctgaccgtctctgggctccaggctgaagatgaggctgattattactgcagctcatatgcaggcagctatgtcttcggaactgggaccaaggtcaccgtcctag

SEQ ID NO: 518 - DNA, 325 bp, Artificial Sequence
  Description of Artificial Sequence: Synthetic polynucleotide
gaaattgtgttgacacagtctccagccaccctgtctttgtctccaggggaaagagccaccctctcctgcagggccagtcagagtgttagcagcttcttagcctggtaccaacagaaacctggccagcctcccaggctcctcatctatggtgcatccaacagggccactggcatcccagccaggttcagtggcagtgggtctgggacagacttcactctcaccatcagcagcctagagcctgaagattttgcagtttattactgtcagcggcgtagcaactggcctccgtggacgttcggccaagggaccaaggtggaaatcaaac

SEQ ID NO: 519 - DNA, 325 bp, Artificial Sequence
  Description of Artificial Sequence: Synthetic polynucleotide
tcctatgtgctgactcagccaccctcagtgtcagtggccccgggaaagacggccaggattacctgtgggggagacaacattagaagtaaaagtgtacactggtaccagcagaagccaggccaggcccctatgttggtcatctattatgatagtgaccggccctcagggatccctgagcgattctctggctccaactctgggaatacggccaccctgaccatcagcagggtcgaaggcggggatgaggccgactattattgtcaggtgtgggatagtagtggtgatcaagcggtattcggcggagggaccaagctgaccgtcctag

SEQ ID NO: 520 - DNA, 319 bp, Artificial Sequence
  Description of Artificial Sequence: Synthetic polynucleotide
gaaattgtgttgacacagtctccagccaccctgtctttgtctccaggggaaagagccaccctctcctgcagggccagtcagagtgttagcacctacttagcctggtaccaacagaaacctggccaggctcccaggctcctcatctatgatgcatccaacagggccactggcatcccagccaggttcagtggcagtgggtctgggacagacttcactctcaccatcagcagcctagagcctgaagattttgcagtttattactgtcagcagcgtagcaagtgggtcactttcggcggagggaccaaggtggagatcaaac

SEQ ID NO: 521 - DNA, 322 bp, Artificial Sequence
  Description of Artificial Sequence: Synthetic polynucleotide
gacatccagatgacccagtctccatcctccctgtctgcatctgtaggagacagagtcaccatcacttgccaggcgagtcaggacattagcaactatttaaattggtatcagcagaaaccagggaaagcccctaagctcctgatctacgatgcatccaatttggaaacaggggtcccatcaaggttcagtggaagtggatctgggacagattttactttcaccatcagcagcctgcagcctgaagatattgcaacatattactgtcaacagtatgataatcccctgatcaccttcggccaagggacacgactggagattaaac

SEQ ID NO: 522 - DNA, 328 bp, Artificial Sequence
  Description of Artificial Sequence: Synthetic polynucleotide
gaaattgtgttgacgcagtctccaggcaccctgtctttgtctccaggggaaagagccaccctctcctgcagggccagtcagagtgttagcagcagctacttagcctggtaccagcagaaacctggccaggctcccaggctcctcatctatggtgcatccagcagggccactggcatcccagacaggttcagtggcagtgggtctgggacagacttcactctcaccatcagcagactggagcctgaagattttgcagtgtattactgtcagcagtatggtagctcacctacgtggacgttcggccaagggaccaaggtggaaatcaaac

SEQ ID NO: 523 - DNA, 328 bp, Artificial Sequence
  Description of Artificial Sequence: Synthetic polynucleotide
cagtctgtgctgactcagccaccctcagcgtctgggacccccgggcagagggtcaccatctcttgttctggaagcagctccaacatcggaagtaattctgtaaactggtaccagaagctcccaggaacggcccccaaactcctcatctatagtaataatcagcggccctcaggggtccctgaccgattctctggctccaagtctggcacctcagcctccctggccatcagtgggctccagtctgaggatgaggctgattattactgtgcagcatgggatgacagcctgaattgggtgttcggcggagggaccaagctgaccgtcctag

SEQ ID NO: 524 - DNA, 328 bp, Artificial Sequence
  Description of Artificial Sequence: Synthetic polynucleotide
tcctatgtgctgactcagccaccctcagtgtcagtggccccaggaaagacggccaggattacctgtgggggaaacaacattggaagtaaaagtgtgcactggtaccagcagaagccaggccaggcccctgttctggtcatctattatgctagcgcccggccctcagggatccctgagcgattctctggctccaactctgggaacacggccaccctgaccatcagcagggtcgaagccggggatgaggccgactattactgtcaggtgtgggacactagtagtgatcattctgtggtattcggcggagggaccaagctgaccgtcctag

SEQ ID NO: 525 - DNA, 328 bp, Artificial Sequence
  Description of Artificial Sequence: Synthetic polynucleotide
tcttctgagctgactcaggaccctgctgtgtctgtggccttgggacagacagtcaggatcacatgccaaggagacagcctcagaaactattatgcaagctggtaccagcagaaaccaggacaggcccctgtacttgtcatctatggtaatatcaaccggccctcagggatcccagaccgattctctggctccagctcaggaaacacagcttccttgaccatcactggggctcaggcggaagatgaggctgactattactgtaactcccgggacagtagtggtaaccagctgggtgtattcggcggagggaccaagctgaccgtcctag

SEQ ID NO: 526 - DNA, 322 bp, Artificial Sequence
  Description of Artificial Sequence: Synthetic polynucleotide
gacatccagatgacccagtctccttccaccctgtctgcatctgtaggagacagagtcaccatcacttgccgggccagtcagactattaatagctggttggcctggtatcagatgaaaccagggaaagcccctaaggtcctgatttacaaggcgtctagtttagaaagtggggtcccatcaaggttcagcggcagtggatctgggacagaattcactctcaccatcagcagcctgcagcctgatgactttgcaacttattattgccaacagtattatatttactctctgtctttcggcggtgggaccaaggtggagatcaaac

SEQ ID NO: 527 - DNA, 337 bp, Artificial Sequence
  Description of Artificial Sequence: Synthetic polynucleotide
cagcttgtgctgactcaatcgccctctgcctctgcctccctgggagcctcggtcaagctcacctgcactctgagcagtgggcacagcagctacgccatcgcatggcatcagcagcagccagagaagggccctcggtacttgatgaagcttaacagtgatggcagccacagcaagggggacgggatccctgatcgcttctcaggctccagctctggggctgagcgctacctcaccatctccagcctccagtctgaggatgaggctgactattactgtcagacctggggcactggcatccatgtggtattcggcggagggaccaagctgaccgtcctag

SEQ ID NO: 528 - DNA, 325 bp, Artificial Sequence
  Description of Artificial Sequence: Synthetic polynucleotide
gaaatagtgatgacgcagtctccagccaccctgtctgtgtctccaggggaaagagccaccctctcctgcagggccagtcagagtgttagcagcaacttagcctggtaccagcagaaacctggccaggctcccaggctcctcatctatggtgcatccaccagggccactggtatcccagccaggttcagtggcagtgggtctgggacagagttcactctcaccatcaccagcctgcagtctgaagattttgcagtttattactgtcagcagtattataactggcctccgtggagttttggccaggggaccaagctggagatcaaac

SEQ ID NO: 529 - DNA, 325 bp, Artificial Sequence
  Description of Artificial Sequence: Synthetic polynucleotide
gacatccagatgacccagtctccatcctccctgtctgcatctgtaggagacagagtcaccatcacttgccgggcgagtcagggcattagcaattctttagcctggtatcagcagaaaccagggaaagcccctaagctcctgctctatgctgcatccagattggaaagtggggtcccatccaggttcagtggcagtggatctgggacggattacactctcaccatcagcagcctgcagcctgaagattttgcaacttattactgtcaacagtattatagtacccccatgtacacttttggccaggggaccaagctggagatcaaac

SEQ ID NO: 530 - DNA, 325 bp, Artificial Sequence
  Description of Artificial Sequence: Synthetic polynucleotide
tcctatgagctgacacagccaccctcggtgtcagtgtccccaggacaaacggccaggatcacctgctctggagatgcattgccaaaaaaatatgcttattggtaccagcagaagtcaggccaggcccctgtgctggtcatctatgaggacagcaaacgaccctccgggatccctgagagattctctggctccagctcagggacaatggccaccttgactatcagtggggcccaggtggaggatgaagctgactactactgttactcaacagacagcagtggtaatcatagggtgttcggcggagggaccaagctgaccgtcctag

SEQ ID NO: 531 - DNA, 325 bp, Artificial Sequence
  Description of Artificial Sequence: Synthetic polynucleotide
tcctatgagctgactcagccaccctcagtgtccgtgtccccaggacagacagccagcatcacctgctctggagataaattgggggataaatatgcttgctggtatcagcagaagccaggccagtcccctgtgctggtcatctatcaagatagcaagcggccctcagggatccctgagcgattctctggctccaactctgggaacacagccactctgaccatcagcgggacccaggctatggatgaggctgactattactgtcaggcgtgggacagcagcactgcacgatatgtcttcggaactgggaccaaggtcaccgtcctag

SEQ ID NO: 532 - DNA, 325 bp, Artificial Sequence
  Description of Artificial Sequence: Synthetic polynucleotide
gacatccagatgacccagtctccatcctccctgtctgcatctgtaggagacagagtcaccatcacttgccaggcgagtcaggacattagcaactatttaaattggtatcagcagaaaccagggaaagcccctaagctcctgatctacgatgcatccaatttggaaacaggggtcccatcaaggttcagtggaagtggatctgggacagattttactttcaccatcagcagcctgcagcctgaagatattgcaacatattactgtcaacagtatgataatctcctcgcgctcactttcggcggagggaccaaggtggagatcaaac

SEQ ID NO: 533 - DNA, 325 bp, Artificial Sequence
  Description of Artificial Sequence: Synthetic polynucleotide
tcctatgagctgacacagccaccctcggtgtcagtgtccccaggacagacggccaggatcacctgctctggagatgcactgccaagacaatatgcttattggtaccagcagaagccaggccaggcccctgtaatgataatatataaagacactgagaggccctcagggatccctgagcgattctctggcttcagctcagggacaacagtcacattgaccatcagtggagtccaggcagaagacgagtctgactattactgtcaatccgcagacagcagtaatacttatgtggtgttcggcggagggaccaagctgaccgtcctaa

SEQ ID NO: 534 - DNA, 307 bp, Artificial Sequence
  Description of Artificial Sequence: Synthetic polynucleotide
cagtctgtgctgacgcagcccccagtctccgggtctttgtctccaggggaaagagtcaccttctgcggcaggtccagtcagcgtgttagcagttacaattacttatcgtggtagcaacagccaccagcccacgctctcaggatccttatttatgatgcttccacgtcggccatgggcatcccagtctggttctgcggcagtggctcggcgacagccttcactatcaccatcatcagcctagagcgtgaagatgatgcagtttatttctcttagcagaccagcatcagcccttgggtttcgacggagg

SEQ ID NO: 535 - DNA, 316 bp, Artificial Sequence
  Description of Artificial Sequence: Synthetic polynucleotide
gacatccagatgacccagtctccatcctccctgtctgcatctgtaggagacagagtcaccatcacttgccgggcaagtcagagcattagcagctatttaaattggtatcagcagaaaccagggaaagcccctaagctcctgatctatgctgcatccagtttgcaaagtggggtcccatcaaggttcagtggcagtggatctgggacagatttcactctcaccatcagcagtctgcaacctgaagattttgcaacttactactgtcaacagagttacagtccccttttcggccctgggaccaaagtggatatcaaac

SEQ ID NO: 536 - DNA, 334 bp, Artificial Sequence
  Description of Artificial Sequence: Synthetic polynucleotide
cagtctgtgctgactcagccaccctcagtgtctgggacccccggacagagggttatcatctcttgttctggaagcagctccaacatcggaagtaattatgtatactggtaccaacaattttcaggaacggcccccaaactcctcatctataggaatactcagaggccctcaggggtccctgaccgaatctctggctccaagtctggcacctcagcctccctggccatcagtgggctccggtccgaggatgaggctgattattactgtgcaacatgggatgacagagtgagggggtattgggtgttcggcggagggaccaagctgaccgtcctag

SEQ ID NO: 537 - DNA, 322 bp, Artificial Sequence
  Description of Artificial Sequence: Synthetic polynucleotide
gacatccagatgacccagtctccatcctccctgtctgcatctgtaggagacagagtcaccatcacttgccgggcaagtcagagcatcaccagatctttaaattggtatcagcagaaaccagggaaagcccctaatgtcctgatctatggtgcatccagtttgcagactggggtcccatcaaggttcagtggcagtggttctgggaccgatttcactctcaccatcagcgctctgcaacctgaggattttgcaacttactactgtcaacagagttacactaccccgatcaccttcggccaggggacacgactggagattaaac

SEQ ID NO: 538 - DNA, 322 bp, Artificial Sequence
  Description of Artificial Sequence: Synthetic polynucleotide
gacatccagatgacccagtctccatctcctccgtgtgcatatgtaggagacagagtcaccatcacttgtcgggggagtcagggtattagaaaagggttagactggtatcagcagaaaccacagaaagcccctaagtccctgatctatgctgcatccagtttgcaaagtggggtcccatcaaggttcagcggcagtggatctgggacagatttcactctcaccatcagcagcctgcagcctgaagattttgcaacttattactgcctacagtataatagttaccctcacttttttgggaaggagaccagtgtagatcaacaca

SEQ ID NO: 539 - DNA, 325 bp, Artificial Sequence
  Description of Artificial Sequence: Synthetic polynucleotide
gaaattgtgttgacgcagtctccagccaccctgtctttgtctccaggggaaagagccaccctctcctgcggggccagtcagagtgttagcagcagctacttagcctggtaccagcagaaacctggcctggcgcccaggctcctcatctatgatgcatccagcagggccactggcatcccagacaggttcagtggcagtgggtctgggacagacttcactctcaccatcagcagactggagcctgaagattttgcagtgtattactgtcagcagtatggtagctcaccgtggacgttcggccaagggaccaaggtggaaatcaaac

SEQ ID NO: 540 - DNA, 322 bp, Artificial Sequence
  Description of Artificial Sequence: Synthetic polynucleotide
gacatccagatgacccagtctccatcttccgtgtctgcatctgtaggagacagagtcaccatcacttgtcgggcgagtcagggtattagcagctggttagcctggtatcagcagaaaccagggaaagcccctaagctcctgatctatgctgcatccagtttgcaaagtggggtcccatcaaggttcagcggcagtggatctgggacagatttcactctcaccatcagcagcctgcagcctgaagattttgcaacttactattgtcaacaggctaacagtttccctcccactttcggcggagggaccaaggtggagatcaaac

SEQ ID NO: 541 - DNA, 337 bp, Artificial Sequence
  Description of Artificial Sequence: Synthetic polynucleotide
gatattgtgatgacccagactccactctcctcacctgtcacccttggacagccggcctccatctcctgcaggtctagtcaaagcctcgtacatagtgatggaaacacctacttgagttggcttcagcagaggccaggccagcctccaagacttctaatttataagatttctgaacggttctctggggtcccagacagattcagtggcagtggggcagagacagatttcacactgaaaatcagcagggtggaagctgaggatgtcggggtttactactgcatgcaagctacacacttcgcgtacacttttggccaggggaccaagctggagatcaaac

SEQ ID NO: 542 - DNA, 337 bp, Artificial Sequence
  Description of Artificial Sequence: Synthetic polynucleotide
gatattgtgatgactcagtctccactctccctgcccgtcacccctggagagttggcctccatctcctgcaggtctagtcagagcctcctgtatagtaatggaaacaactatttggattggtacctgcagaagccagggcagtctccacagctcctgatctatttgggttctaatcgggcctccggggtccctgacaggttcagtggcagtggatcaggcacagattttacactgaaaatcagcagagtggaggctgaggatgttggggtttattactgcatgcaagctctacaaaccccgtacacttttggccaggggaccaagctggagatcaaac

SEQ ID NO: 543 - DNA, 325 bp, Artificial Sequence
  Description of Artificial Sequence: Synthetic polynucleotide
gaaatagtgatgacgcagtctccagccaccctgtctgtgtctccaggggaaagagccaccctctcctgcagggccagtcagagtgttagcagcaacttagcctggtaccagcagaaacctggccaggctcccaggctcctcatctatggtgcatccaccagggccactggtatcccagccaggttcagtggcagtgggtctgggacagagttcactctcaccatcagcagcctgcagtctgaagattttgcagtttattactgtcagcagtataataactggcctccggtcacgttcggccaagggaccaaggtggaaatcaaac

SEQ ID NO: 544 - DNA, 325 bp, Artificial Sequence
  Description of Artificial Sequence: Synthetic polynucleotide
tcctatgagctgacacagccaccctcggtgtcagtgtccccaggacagacggccaggatcacctgctctggagatgcattgccaaagcaatatgcttattggtaccagcagaagccaggccaggcccctgtgctggtgatatataaagacagtgagaggccctcagggatccctgagcgattctctggctccagctcagggacaacagtcacgttgaccatcagtggagtccaggcagaagacgaggctgactattactgtcaatcagcagacagcagtggtaattccgtggtattcggcggagggaccaagctgaccgtcctag

SEQ ID NO: 545 - DNA, 331 bp, Artificial Sequence
  Description of Artificial Sequence: Synthetic polynucleotide
cagtctgtgttgacgcagccgccctcagtgtctgcggccccaggacagaaggtcaccatctcctgctctggaagcagctccaacattgggaataattatgtatcctggtaccagcagctcccaggaacagcccccaaactcctcatctatgaaaataataagcgaccctcagggattcctgaccgattctctggctccaagtctggcacgtcagccaccctggccatcaccggactccagactggggacgaggccgattattgctgcggaacatgggatagcagcctgagtgctggagtgttcggcggagggaccaagctgaccgtcctag

SEQ ID NO: 546 - DNA, 334 bp, Artificial Sequence
  Description of Artificial Sequence: Synthetic polynucleotide
cagcttgtgctgactcaatcgccctctgcctctgcctccctgggagcctcggtcaaggtcacctgcactctgagcagtgggcacagcagctacgccatcgcatggcaccagcagcagccagagaagggccctcggtacttgatgaagcttaacagtgatggcagccacaccaagggggacgggatccctgatcgcttctcaggctccagctctggggctgagcgctacctcaccatctccagcctccagtctgaggatgaggctgactattactgtcagacctggggcactggcattcgggtgttcggcggagggaccaagctgaccgtcctag

SEQ ID NO: 547 - DNA, 330 bp, Artificial Sequence
  Description of Artificial Sequence: Synthetic polynucleotide
cagtctgccctgactcagcctgcctccgtgtctgggtctcctggacagtcgatcaccatctcctgcactggaaccagcagtgatgttgggagttataaccttgtctcctggtctggcaacacggcctccctgacaatctctgggctccaggctgaggacgaggctgattattactgctgctcatatgcaggtagtagcacttgggtattcggcggagggaccaagctgaccctcctagtcagcccaaggctgccccctctatcactcggtttccctcccaaggtagtagcacttgggtattcggcggagggaccaagctgaccgtcctag

SEQ ID NO: 548 - DNA, 322 bp, Artificial Sequence
  Description of Artificial Sequence: Synthetic polynucleotide
gacatccagatgacccagtctccatcctccctgtctgcatctgtaggagacagagtcaccatcacttgccgggcaagtcagagcattagcagctatttaaattggtatcagcagaaaccagggaaagccccaaagctcctgatctatactgcatccagtttgcaaagtggggtcccatcaaggttcagtggcggtggatctgggacagatttcactctcaccatcagcagtctgcaacctgaagattttgcaacttactactgtcaacagagttacagtaccccgtacacttttggccaggggaccaagctggagatcaaac

SEQ ID NO: 549 - DNA, 331 bp, Artificial Sequence
  Description of Artificial Sequence: Synthetic polynucleotide
cagtctgccctgactcagcctcgctcagtgtccgggtctcctggacagtcagtcaccatctcctgcactgaaaccagcagtgatgttggtggttataagtatgtctcctggtaccaacagcacccaggcaaagcccccaaactcatgatttatgatgtcaataagcggccctcaggggtccctgatcgcttctctggctccaagtctggcaacacggcctccctgaccatctctgggctccaggctgaggatgaggctgattattactgctgctcatatgcaggcagctacactcgcgtattcggcggagggaccaagctgaccgtcctag

SEQ ID NO: 550 - DNA, 325 bp, Artificial Sequence
  Description of Artificial Sequence: Synthetic polynucleotide
tcctatgagctgacacagccaccctcggtgtcagtgtccccaggacaaacggccaggatcacctgctctggagatgcattgccaaaaagatatgcttattggtaccagcagaagtcaggccaggcccctgtgctggtcatctatgaggacaccaaacgaccctccgggatccctgagagattctctggctccagctcagggacaatggccaccttgactatcagtggggcccaggtggaggatgaagctgactactactgttactcaacagacagcagtggtaatcatgtggtattcggcggagggaccaagctgaccgtcctag

SEQ ID NO: 551 - DNA, 322 bp, Artificial Sequence
  Description of Artificial Sequence: Synthetic polynucleotide
tcctatgagctgactcagccaccctcagtgtccgtgtccccaggacagacagtcagcatcacctgctctggagataaactgggggagaaatatgtttgctggtatcagcagaagccaggccagtcccctgtgctggtcatctatcaagataagaagcggccctcagggatccctgagcgattctctggctccaactctgggaacacagccactctgaccatcagcgggacccaggctatggatgaggctgactattactgtcaggcgtcggacagcagcacgaattatgtcttcggaactgggaccaaggtcaccgtcctag

SEQ ID NO: 552 - DNA, 337 bp, Artificial Sequence
  Description of Artificial Sequence: Synthetic polynucleotide
gatattgtgatgacccagactccactctcctcacctgtcacccttggacagccggcctccatctcctgcaggtctagtcaaagcctcgtacacagtgatggaaacacctacttgagttggcttcagcagaggccaggccagcccccaagactcctaatttataagatttctgaacgggtctctggggtcccagatagattcagtggcagtggggcagagacagatttcacactgaaaatcagcagggtggaagctgaggatgtcggggtttattactgcatgcaagctacacaattcgcgtacagttttggccaggggaccaagctggagatcaaac

SEQ ID NO: 553 - DNA, 325 bp, Artificial Sequence
  Description of Artificial Sequence: Synthetic polynucleotide
tcctatgagctgacacagccaccctcggtgtcagtgtccccaggacaaacggccaggatcacctgctctggagatgcattgccaaaaaaatatgcttattggtaccagcagaagtcaggccaggcccctgtgctggtcatctatgaggacagcaaacgaccctccgggatccctgagagattctctggctccagctcagggacaatggccaccttgactatcagtggggcccaggtggaggatgaagctgactactactgttactcaacagacagcagtggtaatcatagggtattcggcggagggaccaagctgaccgtcctag

SEQ ID NO: 554 - DNA, 319 bp, Artificial Sequence
  Description of Artificial Sequence: Synthetic polynucleotide
tcctatgagctgactcagccaccctcagtgtccgtgtccccaggacagacagccagcatcacctgctctggagataaattgggggataaatatgcttgctggtatcagcagaagccaggccagtcccctgtgctggtcatctatcaagatagcaagcggccctcagggatccctgagcgattctctggctccaactctgggaacacagccactctgaccatcagcgggacccaggctatggatgaggctgactattactgtcaggcgtgggacagcagcactgtggtattcggcggagggaccaagctgaccgtcctag

SEQ ID NO: 555 - DNA, 337 bp, Artificial Sequence
  Description of Artificial Sequence: Synthetic polynucleotide
cagtctgccctgactcagcctgcctccgtgtctgggtctcctggacagtcgatcaccatctcctgcactggcaccagcagtgacgttggtggttataactatgtctcctggtaccaacaacacccaggcaaagcccccaaactcatgatttatgatgtcagtaatcggccctcaggggtttctaatcgcttctctggctccaagtctggcaacacggcctccctgaccatctctgggctccaggctgaggacgaggctgattatttctgcagctcatatacaaccagcagcacccccccttatgtcttcggaactgggaccaaggtcaccgtcctac

SEQ ID NO: 556 - DNA, 328 bp, Artificial Sequence
  Description of Artificial Sequence: Synthetic polynucleotide
gaaattgtgttgacacagtctccagccaccctgtctttgtctccaggggaaagagccaccctctcctgcagggccagtcagagtgttagcagcttcttagcctggtaccagcagaaacctggccaggctcccaggctcctcatctatgatgcatccaacagggccactggcatcccagccaggttcagtggcagtgggtctgggacagacttcactctcaccatcagcagcctagagcctgaagattttgcagtttattactgtcagcagcgtagtaactggcctccgaagctcactttcggcggagggaccaaggtggagatcaaac

SEQ ID NO: 557 - DNA, 325 bp, Artificial Sequence
  Description of Artificial Sequence: Synthetic polynucleotide
gacatccagatgacccagtctccttccaccctgtctgcatttctaggagacagagtctccatcacttgccgggccagtcaggatcttagtagctccttggcctggtatcagcagaaaccagggaaagcccctaagctcctgatctatgaggcgtctactttagaaagtggggtcccgtcaaggttcagcggcagtggatctgggaccgaattcactctcaccatcagcggcctgcagcctgatgattttgcaacttattactgccaacagtataagaattattcaccggtcactttcggccctgggagcaaagtggaaatcaaac

SEQ ID NO: 558 - DNA, 322 bp, Artificial Sequence
  Description of Artificial Sequence: Synthetic polynucleotide
gacatccagatgacccagtctccatcctccctgtctgcatctgtaggagacagagtcaccatcacttgccgggcaagtcagagcattagcagctatttaaattggtatcagcagaaaccagggaaagcccctaagctcctgatctatgctgcatccagtttgcaaagtggggtcccatcaaggttcagtggcagtggatctgggacagatttcactctcaccatcagcagtctgcaacctgaagattttgcaacttactactgtcaacagagtgacagtaccttgctcactttcggcggagggaccaaggtggagatcaaac

SEQ ID NO: 559 - DNA, 334 bp, Artificial Sequence
  Description of Artificial Sequence: Synthetic polynucleotide
gaaattgtgttgacacagtctccagccaccctgtctttgtctccaggggaaagagccaccctctcctgcagggccagtcagagtcttagcagttacaattacttagcctggtaccaacagaaacctggccaggctcccaggctcctcatttatgctgcatccaagagggccactggcatcccagccaggttcagtggcagtgggtctgggacagacttcactctcaccatcagcagcctagagcctgaagattttgcagtttatttctgtcagcagcgtagcatcaggcctccggcgtggacgttcggcccagggaccaaggtggaaatcaaac

SEQ ID NO: 560 - DNA, 325 bp, Artificial Sequence
  Description of Artificial Sequence: Synthetic polynucleotide
gaaattgtgttgacgcagtctccaggcaccctgtctttgtctccaggggaaagagccaccctctcctgcagggccagtcagagtgttagcagcagctacttagcctggtaccagcagaaacctggccaggctcccaggctcctcatctatggtgcatccagcagggccactgacatcccagacaggttcagtggcagtgggtctgggacagacttcactctcaccatcagcagactggagcctgaagattttgcagtgtattactgtcagcagtgtggtagctcacccaggacgttcggccaagggaccaaggtggaaatcaaac

SEQ ID NO: 561 - DNA, 340 bp, Artificial Sequence
  Description of Artificial Sequence: Synthetic polynucleotide
gacatcgtgatgacccagtctccagactccctggctgtgtctctgggcgagagggccaccatcaactgcaagtccagccagagtgttttatacagctccaacaataagaactacttagcttggtaccagcagaaaccaggacagcctcctaagctgctcatttactgggcatctacccgggaatccggggtccctgaccgattcagtggcagcgggtctgggacagatttcactctcaccatcagcagcctgcaggctgaagatgtggcagtttattactgtcagcaatattatgtttctcccctcactttcggcggagggaccaaggtggagatcaaac

SEQ ID NO: 562 - DNA, 322 bp, Artificial Sequence
  Description of Artificial Sequence: Synthetic polynucleotide
gaaatagtgatgacgcagtctccagccaccctgtctgtgtctccaggggaaagagccaccctctcctgcagggccagtcagagtcttagcagcaacttagcctggtaccagcagaaacctggccaggctcccaggctcctcatctatggtgcatccaccagggccactggtatcccagccaggttcagtggcagtgggtctgggacagagttcactctcaccatcagcagcctgcagtctgaagattttgcagtttattactgtcagcagtataataactggccacagacgttcggccaagggaccaaggtggaaatcaaac

SEQ ID NO: 563 - DNA, 322 bp, Artificial Sequence
  Description of Artificial Sequence: Synthetic polynucleotide
gacatccagatgacccagtctccttccaccctgtctgcatctgtaggagacagagtcaccatcacttgccgggccagtcagagtattagtagctggttggcctggtatcagcagaaaccagggaaagcccctaagctcctgatctataaggcgtctagtttagaaagtggggtcccatcaaggttcagcggcagtggatctgggacagaattcactctcaccatcagcagcctgcagcctgatgattttgcaacttattactgccaacagtataatagttattcgatcaccttcggccaagggacacgactggagattaaac

SEQ ID NO: 564 - DNA, 319 bp, Artificial Sequence
  Description of Artificial Sequence: Synthetic polynucleotide
gacatccagatgacccagtctccatcctccctgtctgcatctgtaggagacagagtcaccatcacttgccgggcaagtcagaccattatcagctatttaaattggtatcagcagaaaccagggaaagcccctaacctcctgatctatgctgcatccagtttgcaaagtggggtcccatcaaggttcagtggcagtggatctgggacagctttcactctcaccatcagcagtctgcaacctgaagattttgcaacttactactgtcaacagagttacagtctgcacagttttggccaggggaccaagctggagatcaaac

SEQ ID NO: 565 - DNA, 331 bp, Artificial Sequence
  Description of Artificial Sequence: Synthetic polynucleotide
cagtctgccctgactcaggctgcctccgtgtctgggtctcctggacagtcgatcaccatctcctgcactggaaccagcagtgacgttggtggttataactatgtctcctggtaccaacaacacccaggcaaagcccccaaactcatgatttatgatgtcagtaatcggccctcaggggtttctaatcgcttctctggctccaagtctggcaacacggcctccctgaccatctctgggctccaggctgaggacgaggctgcttattactgcagctcatatacaaggagcagcactctggtattcggcggagggaccaagctgaccgtcctag

SEQ ID NO: 566 - DNA, 325 bp, Artificial Sequence
  Description of Artificial Sequence: Synthetic polynucleotide
gacatccagatgacccagtctccttccaccctgtctgcatctctaggagacagagtctccatcacttgccgggccagtcaggatattagtagctgcttggcctggtatcagcagaaaccagggaaagcccctaagctcctgatctatgaggcgtctactttagaaagtggggtcccatcaaggttcagcggcagtggatctgggacagaattcactctcaccatcagcagcctgcagcctgatgattttgcaacttattactgccaacagtataagaattattcaccggtcactttcggccctgggaccaaagtggaaatcaaac

SEQ ID NO: 567 - DNA, 322 bp, Artificial Sequence
  Description of Artificial Sequence: Synthetic polynucleotide
gacatccagatgacccagtctccatcctccctgtctgcatctgtaggagacagagtcaccatcacttgccgggcaagtcagagcattagcagctttttaaattggtatcagcagaaaccagggaaagcccctaagctcctgatctatgctgcatccactttgcaaagtggggtcccatcaaggttcagtggcggtggatctgggacagatttcactctcaccatcagcagtctgcaacctgaagattttgcaacttacttctgtcaacagagttacagtacggagttcactttcggccctgggaccaaagtggatatcaaac

SEQ ID NO: 568 - DNA, 325 bp, Artificial Sequence
  Description of Artificial Sequence: Synthetic polynucleotide
gacatccagttgacccagtctccatccttcctgtctgcatctgtaggagacagagtcaccatcacttgccgggccagtcagggcattagcaattatttagcctggtatcagcaaaaaccagggaaagcccctaagctcctgatctatgctgcatccactttgcaaagtggggtcccatcaaggttcagcggcagtggatctgggacagaattcactctcacaatcagcagcctgcagcctgaagattttgcaacttattactgtcaacagcttaatagttaccctctcttcactttcggccctgggaccaaagtggatatcaaac

SEQ ID NO: 569 - DNA, 319 bp, Artificial Sequence
  Description of Artificial Sequence: Synthetic polynucleotide
tcctatgagctgactcagccaccctcagtgtctgtgtccccaggacagacagccagcatcacctgctctggaaataaattgggggataaagatacttgctggtatcaacagaggccaggccagtcccctgtggtggtcatctatcaagataccaagcggccctcagggatccctgagcgattctctggctccaactctgggaacacagccactctgaccatcagcgggacgcaggctatggatgaggctgattattactgtcaggcgtgggacagcagtaccttggtattcggcggagggaccaagctgaccgtcctag

SEQ ID NO: 570 - DNA, 325 bp, Artificial Sequence
  Description of Artificial Sequence: Synthetic polynucleotide
gacatccagatgacccagtctccttccaccctgtctgcatctctaggagacagagtctccatcacttgccgggccagtcaggatcttagtagctccttggcctggtatcagcagaaaccagggaaagcccctaagctcctgatctatgaggcgtctactttagaaagtggggtcccgtcaaggttcagcggcagtggatctgggacagaattcactctcaccatcagcagcctgcagcctgatgattttgcaacttattactgccaacagtataagaattattcaccggtcactttcggccctgggagcaaagtggaaatcaaac

SEQ ID NO: 571 - DNA, 316 bp, Artificial Sequence
  Description of Artificial Sequence: Synthetic polynucleotide
gaaattgtgttgacgcagtctccatctccaggggaaagagccaccctctcctgcagggccagtcagagtgttagcagcagctacttagcctggtaccagcagaaacctggccaggctcccaggctcctcatctatggtgcatccagcagggccactggcatcccagacaggttcagtggcagtgggtctgggacagacttcactctcaccatcagcagactggagcctgaagattttgcagtgtattactgtcagcagtatggtagctcacctccgggattcgctttgggacctggcagcaaatcgaataacctgc

SEQ ID NO: 572 - DNA, 307 bp, Artificial Sequence
  Description of Artificial Sequence: Synthetic polynucleotide
gacatccagatgacccagtcttctgtaggagacagagtcaccatcacttgtcgggccagtcagggtattagcaattggttagcctggtatcagcaaaaaccagggaaagcccctaagctcctgatctattctgcatccactttgcaaagtggggtcccatcaaggttcagcggcagtggatctgggacagatttcactctcaccatcagcagcctgcagcctgaagattttgcaacttattattgtcaacagattaatagtttccctcacttcactttcgggactggaatggacatgaaaataactg

SEQ ID NO: 573 - DNA, 328 bp, Artificial Sequence
  Description of Artificial Sequence: Synthetic polynucleotide
tcctatgtgctgactcagccaccctcagtgtcagtggccccaggaaagacggccaggattccctgtgggggaaacaacattggaagtaaaagtgtgcactggtaccagcagaagccaggccaggcccctgtgctggtcatctattatgatagcgaccggccctcagggatccctgagcgattctctgcctccaactctgggaacacggccaccctgaccatcagcagggtcgaagccggggatgaggccgactattactgtcaggtgtgggatagtagtagtgatcatcctgtggtattcggcggagggaccaagctgaccgtcctag

SEQ ID NO: 574 - DNA, 322 bp, Artificial Sequence
  Description of Artificial Sequence: Synthetic polynucleotide
gacatccagatgacccagtctccttccaccctgtctgcatctgtaggagacagagtcaccatcacttgccgggccagtcagagtattagtacctggttggcctggtatcagcagaaaccagggaaagcccctaagctcctgatctataaggcgtctagtttagaaagtggggtcccatcaaggttcagcggcagtggatctgggacagaattcactctcaccatcagcagcctgcagcctgatgattttgcaacttattactgccaacactataatacttatgcgtggacgttcggccaagggaccaaggtggaaatcaaac

SEQ ID NO: 575 - DNA, 331 bp, Artificial Sequence
  Description of Artificial Sequence: Synthetic polynucleotide
cagtctgccctgactcagcctgcctccgtgtctgggtctcctggacagtcgatcaccatctcctgcactggaaccagcagtgacgttggtggttataactatgtctcctggtaccaacaacacccaggcaaagcccccaaactcttgatttatgatgtcaataatcggccctcaggggtttctaatcgcttctctggctccaagtctggcaacacggcctccctgaccatctctgggctccaggctgacgacgaggctgattattactgcagctcatttacaagcatcagcacttgggtattcggcggagggaccaagctgaccgtcctag

SEQ ID NO: 576 - DNA, 322 bp, Artificial Sequence
  Description of Artificial Sequence: Synthetic polynucleotide
gacatccagatgacccagtctccttccaccctgtctgcatctgtaggagacagagtcaccatcacttgccgggccagtcagagtattagtagctggttggcctggtatcagcagaaaccagggaaagcccctaagctcctgatctataaggcgtctagtttagaaagtggggtcccatcaaggttcagcggcagtggatctgggacagaattcactctcaccatcagcagcctgcagcctgatgattttgcaagttattactgccaacactataatagttattctcagacgttcggccaagggaccaaggtggaaatcaaac

SEQ ID NO: 577 - DNA, 325 bp, Artificial Sequence
  Description of Artificial Sequence: Synthetic polynucleotide
gacatccagttgacccagtctccatccttcctgtctgcatctgtaggagacagagtcaccatcacttgccgggccagtcaggtcattagcaattatttagcctggtatcaccaaaaaccagggaaagcccctaagctcctgatctatgctgcatccactttgcaaagtggggtcccatcaaggttcagcggcagtggatctgggacagaattcactctcacaatcagcagcctgcagcctgaagattttgcaacttattactgtcaacagcttaatagttaccccctattcactttcggccctgggaccaaagtggatatcaaac

SEQ ID NO: 578 - DNA, 322 bp, Artificial Sequence
  Description of Artificial Sequence: Synthetic polynucleotide
gacatccagatgacccagtctccatcctccctgtctgcatctgtaggagacagagtcaccatcacttgccgggcaagtcagagcattagtagctatttaaattggtatcagcaaaaaccagggaaagcccctaagctcctgatctatgctgcatccagtttgcaaagtggggtcccatcaaggttcagtggcagtggatctgggacagatttcactctcaccatcagcagtctgcaacctgaagattttgcaacttactactgtcaacagagttacagtacccctaacacttttggccaggggaccaagctggagatcaaac

SEQ ID NO: 579 - DNA, 325 bp, Artificial Sequence
  Description of Artificial Sequence: Synthetic polynucleotide
gaaattgtgttgacacagtctccagccaccctgtctttgtctccaggggaaagagccaccctctcctgcagggccagtcagagtgttagcagctacttagcctggtaccaacagaaacctggccaggctcccaggctcctcatctatgatgcatccaacagggccactggcatcccagccaggttcagtggcagtgggtctgggacagacttcactctcaccatcagcagcctagagcctgaagattttgcagtttattactgtcagcagcgtaacaactggcctccgatcaccttcggccaagggacacgactggagattaaac

SEQ ID NO: 580 - DNA, 325 bp, Artificial Sequence
  Description of Artificial Sequence: Synthetic polynucleotide
tcctatgagctgacacagccaccctcggtgtcagtgtccccaggacaaacggccaggatcacctgctctggagatgcattgccaaaaaaatatgcttattggtaccagcagaagtcaggccaggcccctgtgctggtcatctctgaggacagcaaacgaccctccgggatccctgagagattctctggctccagttcagggacaatggccaccttgactatcagtggggcccaggtggaggatgaagctgactactactgttactcaacagacagcagtggtaatcatagggtgttcggcggagggaccaagctgaccgtcctag

SEQ ID NO: 581 - DNA, 331 bp, Artificial Sequence
  Description of Artificial Sequence: Synthetic polynucleotide
cagtctgccctgactcagtctgcctccgtctctgggtctcctggacagtcgatcaccatctcctgcacgggaaccagcagtgacattgctgcttataactacgtctcctggtaccaacaacacccaggcgaagtccccaaacttctcgtttatgatgtcagtaatcggccctcaggggtttctgatcgcttcgctggctccaggtctggcaacacggcctacctgaccatctctggactccaggctgaggacgacgctgattattactgcagctcatatacaagcagcggtggtctcgtcttcggaggtgggaccaaggccaccgtcctag

SEQ ID NO: 582 - DNA, 325 bp, Artificial Sequence
  Description of Artificial Sequence: Synthetic polynucleotide
gaaattgtgttgacgcagtctccaggcaccctgtctttgtctccaggggaaggagccaccctctcctgcagggccagtcagagtgttagcagcagctacttagcctggtaccagcaaaaacctggccgggctcccaggctcctcatctatggtgcatccagcagggccactggcatcccagacaggttcagtggcagtgggtctgggacagacttcactctcaccatcagcagactggagcctgaagattttgcagtgtattactgtcagttgtatggtagctcaccgtacacttttggccaggggaccaagctggagatcaaac

SEQ ID NO: 583 - DNA, 322 bp, Artificial Sequence
  Description of Artificial Sequence: Synthetic polynucleotide
gacatccagatgacccagtctccttccaccctgtctgcatctgtaggagacagagtcaccatcacttgccgggccagtcagagtattagtagctggttggcctggtatcagcagaaaccagggaaagcccctaagctcctgatctataaggcgtctagtttagaaagcggggtcccatcaaggttcagcggcagtggatctgggacagaattcactctcaccatcagcagcctgcagcctgatgattttgcaacttattactgccaacagtataatacttattcgtggacgttcggccaagggaccaaggtggaaatcaaac

SEQ ID NO: 584 - DNA, 334 bp, Artificial Sequence
  Description of Artificial Sequence: Synthetic polynucleotide
cagcttgtgctgactcaatcgccctctgcctctgcctccctgggagcctcggtcaagctcacctgcactctgagcagtgggcacagcagctacgccatcgcatggcatcagcagcagccagagaagggccctcgttacttgatgaagcttaacagtgatggcagccacaccaagggggacgggatccctgatcgcttctcaggctccagctctggggctgagcgctacctcaccatctccagcctccagtctgaggatgaggctgactattactgtcagacctggggcactggcattcaggtgttcggcggagggaccaagctgaccgtcctag

SEQ ID NO: 585 - DNA, 322 bp, Artificial Sequence
  Description of Artificial Sequence: Synthetic polynucleotide
gacatccagatgacccagtctccatcttctgtgtctgcatctgtaggagacagagtcaccatcacttgtcgggcgagtcagggtattagcagtcggttagcctggtatcagcagaaaccagggaaagcccctaagctcctgatctatggtgcatccagtttgcaaagtggggtcccatcaaggttcagcggcagtggatctgggacagatttcactctcactatcagcagcctgcagcctgaagattttgcaacttactattgtcaacaggctaacagtttccctctcactttcggcggagggaccaaggtggagatcaaac

SEQ ID NO: 586 - DNA, 325 bp, Artificial Sequence
  Description of Artificial Sequence: Synthetic polynucleotide
tcctatgagctgacacagccaccctcggtgtcagtgtccccaggacaaacggccaggatcacctgctctggagatgcattgccaaaaaaatatgcttattggtaccagcagaagtcaggccaggcccctgtgctggtcatctatgaggacagcaaacgaccctccgggatccctgagagattctctggctccagctcagggacaatggccaccttgactatcagtggggcccaggtggaggatgaagctgactactactgttattcaacagacaacagtggtaatcggtgggtgttcggcggagggaccaagctgaccgtcctag

SEQ ID NO: 587 - DNA, 322 bp, Artificial Sequence
  Description of Artificial Sequence: Synthetic polynucleotide
gaaattgtgttgacgcagtctccaggcaccttgtctttgtctccaggggaaagagccaccctctcctgcagggccagtcagagtgttagcagcaggtacttagcctggtaccagcagaaacctggccaggctcccaggctcctcatctatggtgcatccagcagggccactggcatcccagacaggttcagtggcagtgggtctgggactgacttcactctcaccatcagcagactggagcctgaagattttgcagtgtattactgtcagcagtatggtagcttgtacagttttggccaggggaccaagctggagatcaaac

SEQ ID NO: 588 - DNA, 331 bp, Artificial Sequence
  Description of Artificial Sequence: Synthetic polynucleotide
cagtctgtgctgactcagccaccctcagcgtctgggacccccgggcagagggtcaccatctcttgttctggaagcagctccaacatcggaagtaatgctgtaaactggtaccagcagctcccaggaacggcccccaaactcctcatctatagtaataatcagcggccctcaggggtccctgaccgattctccggctccaagtctggcacctcagcctccctggccatcagtgggctccagtctgaggatgaggctgattattactgtgcagcatgggatgacagcctgaatggtccgggattcggcggagggaccaaggtgaccgtcctag

SEQ ID NO: 589 - DNA, 319 bp, Artificial Sequence
  Description of Artificial Sequence: Synthetic polynucleotide
gacatccagatgacccagtctccttccaccctgtctgcatctgtaggagacagagtcaccatcacttgccgggccagtcagagtattagtagctggttggcctggtatcagcagaaaccagggaaagcccctaacctcctgatctatcaggcgtctactttagaaagtggtgtcccatcaaggttcagcggcagtggatctgggacagaattcactctcaccatcagcagcctgcagcctgatgattttgcaacttattactgccaacagtataatagttattacacttttggccaggggaccaagctggagatcaaac

SEQ ID NO: 590 - DNA, 322 bp, Artificial Sequence
  Description of Artificial Sequence: Synthetic polynucleotide
gaaattgtgttgacgcagtctccaggcaccctgtctttgtctccaggggaaagagccaccctctcctgcagggccagtcagactcttaggaacaactatttagcctggtaccagcagaagcctggccaggctccctggctcctcatctatggtgcatacaacagggccactggcatcccagacaggttcagtggcagtgggtctgggacagacttcactctcaccgtcagcagactggagcctgaagattttgcagtgtattactgtcagcagtatggtagttcacctactttcggccaagggacacgactggagattagac

SEQ ID NO: 591 - DNA, 322 bp, Artificial Sequence
  Description of Artificial Sequence: Synthetic polynucleotide
gacatccagttgacccagtctccatccttcctgtctgcatctgtaggagacagagtcaccatcacttgccgggccagtcagggcattagcagttatttagcctggtatcagcaaaaaccagggaaagcccctaagctcctgatctatgctgcatccactttgcaaagtggggtcccatcaaggttcagcggcagtggatctgggacagaattcactctcacaatcagcagcctgcagcctgaagattttgcaacttattactgtcaacagcttaatagttatccatgcactttcggcggagggaccagggtggcgatcaaac

SEQ ID NO: 592 - DNA, 328 bp, Artificial Sequence
  Description of Artificial Sequence: Synthetic polynucleotide
gaaattgtgttgacgcagtctccaggcaccctgtctttgtctccaggggaaagagccaccctctcctgcagggccagtcagagtgttagcagcagctacttagcctggtaccagcagaaacctggccaggctcccaggctcctcatctatggtgcatccagcagggccactggcatcccagacaggttcagtggcagtgggtctgggacagacttcactctcaccatcagcagactggagcctgaagattttgcattgtattactgtcagcagtatggtagctcaccgatgtacacttttggccaggggaccaagctggagatcaaac

SEQ ID NO: 593 - DNA, 325 bp, Artificial Sequence
  Description of Artificial Sequence: Synthetic polynucleotide
cagtctgccctgactcagcctcgctcagtgtccgggtctcctggacagtcagtcaccatctcctgcactggaaccagcagtgatgttggtggttataactatgtctcctggtaccaacatcacccaggcaaagcccccaaactcttgatttatgatgtcagtaagcggccctcaggggtccctgatcgcttctctggctccaagtctggcaacacggcctccctgaccatctctgggctccaggctgaggatgaggctgattattactgctgctcatatgcaggcttctacactttcggcggagggaccaagctgaccgtcctag

SEQ ID NO: 594 - DNA, 319 bp, Artificial Sequence
  Description of Artificial Sequence: Synthetic polynucleotide
gaaattgtgttgacacagtctccagccaccctgtctttgtctccaggggaaagagccaccctctcctgcagggccagtcagagtgttagcagctacttagcctggtaccaacacaaacctggccaggctcccaggctcctcatctatgatgcatccaacagggccactggcatcccagccaggttcagtggcagtgggtctgggacagacttcactctcaccatcagcagcctagagcctgaagattttgcagtttattactgtcagcagcgtagcaactggccagggttcggccctgggaccaaagtggatatcaaac

SEQ ID NO: 595 - DNA, 319 bp, Artificial Sequence
  Description of Artificial Sequence: Synthetic polynucleotide
tcctatgagctgactcagccaccctcagtgtccgtgtccccaggacagacagccagcatcacctgctctggagataaattgggggataaatatgtttgctggtatcagcagaagccaggccagtcccctgtgctggtcatctatcaagataccaagcggccctcagggatccctgagcgattctctggcgccaactctgggaacacagccactctgaccatcagcgggacccaggctatggatgaggctgactattactgtcaggcgtgggacagcagcactggggtaatcggcggagggaccaagctgaccgtcctag

SEQ ID NO: 596 - DNA, 331 bp, Artificial Sequence
  Description of Artificial Sequence: Synthetic polynucleotide
cagtctgccctgactcagcctgcctccgtgtctgggtctcctggacagtcgatcaccatctcctgcactggaaccatcagtgacgttggtgtttataactatgtctcctggtaccaacaacacccagtcaaagcccccaaactcatgatttatgatgtcataaatcggccctcaggggtttctaatcgcttctctggctccaagtctggcaacacggcctccctgaccatctctgggctccaggctgaggacgaggctgattattactgcagctcatatacaagcagcaccactctagtattcggcggagggaccaagctgaccgtcctag

SEQ ID NO: 597 - DNA, 319 bp, Artificial Sequence
  Description of Artificial Sequence: Synthetic polynucleotide
tcctatgagctgactcagccaccctccgtgtccgtgtccccaggtcagaccgccagcatcacctgctctggagataagttgggacatacatctgtttgctggtatcagcagaagtcaggccggtcccctgtcctggtcatctgtcaagatacgaagcggccctcagggatccctgagcgattctctggctccaactctgggaacacagccactctgaccatcagcgggacccaggctatcgatgaggctgagtattactgtcaggcgtgggacagcaagactgtgattttcggcggagggaccaagctgaccgtcctag

SEQ ID NO: 598 - DNA, 322 bp, Artificial Sequence
  Description of Artificial Sequence: Synthetic polynucleotide
tcctatgagctgactcagccaccctcagtgtccgtgtccccaggacagacagccagcatcacctgctctggagataaattgggggataaatatgcttgctggtatcagcagaggccaggccagtcccctgtgctggtcatctatcaagataccaagcggccctctgggatccctgagcgattctctggctccaactctgggaacacagccactctgaccatcagcgggacccagactatggatgaggctgactattactgtcaggcgtgggacagcagcactgcaggggtcttcggaactgggaccaaggtcaccgtcctag

SEQ ID NO: 599 - DNA, 322 bp, Artificial Sequence
  Description of Artificial Sequence: Synthetic polynucleotide
gacatccagatgacccagtctccatccgccctgtctgcttctataggagacagagtcaccatctcttgtcgggcaagtcagaccgttagcggttatttaaattggtatcagcagaaaccagggaaagcccctaaactcttaatctatgctacattcactctgcaaagtggcgtcccacccaggttcagtggaggtggatctgagacagatttcaccctcaccataagtagtctccaacatgaagattctgcaatttactactgtcaacagagttacgctgttccgtggacgttcggccaggggaccaaggtggaaatcaagc

SEQ ID NO: 600 - DNA, 325 bp, Artificial Sequence
  Description of Artificial Sequence: Synthetic polynucleotide
tcctatgagctgacacagccaccctcggtgtcagtgtccccaggacaaacggccaggatcacctgctctggagatgcattgccaaaaaaatatgcttattggtaccagcagaagtcaggccaggcccctgtgctggtcatctatgaggacaacaaacgaccctccgggatccctgagagactctctggctccagctcagggacaatggccactttgactatcagtggggcccaggtggaggatgaggctgactactactgtcactcagcagacaccagtggtcatcattgggtgttcggcggagggaccaagctgaccgtcctag

SEQ ID NO: 601 - DNA, 340 bp, Artificial Sequence
  Description of Artificial Sequence: Synthetic polynucleotide
gacatcgtgatgacccagtctccagactccctggctgtgtctctgggcgagagggccaccatcaactgcaagtccagccagcctattttctacagtaccaacaataagaactacttagcttggtatcagcagagaccaggccagcctccaaagctgctcatttactgggcatctagccgggaatccggggtccctgaccgattcagcggcagcgggtctgggacagatttcactctcaccatcagcagcctgcaggctgaagatgtggcggtttattactgtcagcaatatcatgatactccgtggacgttcggccaggggaccaaggtggagatcaaac

SEQ ID NO: 602 - DNA, 331 bp, Artificial Sequence
  Description of Artificial Sequence: Synthetic polynucleotide
cagtctgtgctgactcagccaccctcagcgtctgggacccccgggcagagggttaccatctcttgttctggaagcagctccaacatcggaagtaatactgtaaactggtaccagctgctcccaggaacggcccccaaactcctcatctatagtaataatcagcggccctcaggggtccctgaccgattctctggctccaagtctggcacctcagcctccctggccatcagtgggctccagtctgaggatgaggctgattattactgtgcagcatgggatgacagcctgaatggtccggtattcggcggagggaccaagctgaccgtcctag

SEQ ID NO: 603 - DNA, 328 bp, Artificial Sequence
  Description of Artificial Sequence: Synthetic polynucleotide
tcctatgagctgacacagccaccctcggtgtcagtgtccccaggacaaacggccaggatcacctgctctggagatgcattgccaaaaaaatatgcttattggtaccagcagaggtcaggccaggcccctgtgctggtcatctatgaggacagcaaacgaccctccgggatccctgagagattctctggctccagctcagggacaatggccaccttgactatcagtggggcccaggtggaggatgaagctgactactactgttactcaacagacagcagtggtaatcataattatgtcttcggaactgggaccaaggtcaccgtcctag

SEQ ID NO: 604 - DNA, 334 bp, Artificial Sequence
  Description of Artificial Sequence: Synthetic polynucleotide
cagtctgccctgactcagcctccctccgcgtccgggtctcctggacagtcagtcaccatctcctgcactggaaccagcagtgacgttggtggttataactatgtctcctggtaccaacagcacccaggcaaagcccccaaactcataatttctgaggtcagtcagcggccctcaggggtccctgatcgcttctctggctccaagtctggcaacacggcctccctgaccgtctctgggctccaggctgaggatgaggctgattattactgcagctcatatgcaggcaccaacaatttcggggtattcggcggagggaccaagctgaccgtcctag

SEQ ID NO: 605 - DNA, 328 bp, Artificial Sequence
  Description of Artificial Sequence: Synthetic polynucleotide
cagtctgccctgactcagcctgcctccgtgtctgggtctcctggacagtcgatcaccatctcctgcactggaaccagcagtgatgttgggagttataaccttgtctcctggtaccaacagcacccgggcaaagcccccaaactcatgatttatgagggcattaagcggccctcaggggtttctaatcgcttctctggctccaagtctggcaacacggcctccctgacaatctctgggctccaggctgaggacgaggctgattattactgctgctcatatgcaggtagccatgtggtattcggcggagggaccaacctgaccgtcctag

SEQ ID NO: 606 - DNA, 340 bp, Artificial Sequence
  Description of Artificial Sequence: Synthetic polynucleotide
gacatcgtgatgacccagtctccagactccctggctgtgtctctgggcgagagggccaccatcaactgcaagtccagccagcctattttctacagtaccaacaataagaactacttagcttggtatcagcagagaccaggccagcctccaaagctgctcatttactgggcatctagccgggaatccggggtccctgcccgattcagtggtagcgggtctgggacagatttcactctcaccatcaacagcctgcaggctgaagatgtggcggtttattactgtcagcaatatcatgatactccgtggacgttcggccaggggaccaaggtggagatcaaac

SEQ ID NO: 607 - DNA, 322 bp, Artificial Sequence
  Description of Artificial Sequence: Synthetic polynucleotide
tcctatgagctgactcagccaccctcagtgtccgtgtccccaggacagacagccagcatcacctgctctggagatgaattgggggataaatatgcttgctggtatcagcagaagccaggccagtcccctgtgctggtcatctatcgagatagcaagcggccctcagggatccctgagcgattctctggctccaactctgggaacacagccactctgaccatcagcgggacccaggctatggatgaggctgactattactgtcaggcgtgggacagcaacactttttatgtcttcggaactgggaccaaggtcaccgtcctag

SEQ ID NO: 608 - DNA, 322 bp, Artificial Sequence
  Description of Artificial Sequence: Synthetic polynucleotide
gacatccagatgacccagtctccatcttccgtgtctgcatctgtaggagacagagtcaccctcgcttgtcgggcgagtcagggtattagcagctggttagcctggtatcagcagaaaccagggaaagcccctaagttcctgatctatattgcatccagtttgcaaagtggggtcccatcaaggttcagcggcagtggatctgggacaaatttcactctcaccatcagcagcctgcagcctgaagattttggaacttactattgtcaacaggctagggatttcccgtacacttttgggcaggggaccaaggtggagatcagac

SEQ ID NO: 609 - DNA, 325 bp, Artificial Sequence
  Description of Artificial Sequence: Synthetic polynucleotide
tcctatgagctgactcagccaccctcagtgtccgtgtccccaggacagacagccagcatcacctgctctggagataaattgggggatagatatgcttgctggtatcagcagaagccaggccagtcccctgtgctggtcatctatcaagataccaagcggccctcagggatccctgagcgattctctggctccaactctgggaacacagccactctgaccatcagcgggacccaggctatggatgaggctgactattactgtcaggcgtgggacagcagcactgcagggggggtattcggcggagggaccaagctgaccgtcctag

SEQ ID NO: 610 - DNA, 340 bp, Artificial Sequence
  Description of Artificial Sequence: Synthetic polynucleotide
gacatcgtgatgacccagtctccagactccctggctgtgtctctgggcgagagggccaccatcaactgcaagtccagccagagtgttttatacagctccaacaataagaactacttagcttggtaccagcagagaccaggacagcctcccaagctgctcatttactgggcatctacccgggaatccggggtccctgaccgattcagtggcagcgggtctgggacagatttcactctcaccatcagcagcctgcaggctgaagatgtggcagtttattcctgtcagcaatattatagtactcctctcactttcggcggagggaccaaggtggagatcaaac

SEQ ID NO: 611 - DNA, 334 bp, Artificial Sequence
  Description of Artificial Sequence: Synthetic polynucleotide
cagtctgtgctgacgcagccgccctcagtgtctggggccccagggcagagggtcaccatctcctgcactgggagcagctccaacatcggggcaggttatgatgtacactggtaccagcagcttccaggaacagcccccaaactcctcatctatggtaacaccaatcggccctcaggggtccctgaccgattctctggctccaagtctggcacctcagcctccctggccatcactgggctccaggctgaggatgaggctgattattcctgccagtcctttgacagcagcctgagtggttcggtattcggcggagggaccaagctgaccgtcctag

SEQ ID NO: 612 - DNA, 322 bp, Artificial Sequence
  Description of Artificial Sequence: Synthetic polynucleotide
gacatccagatgacccagtctccttccaccctgtctgcatctgtaggagacagagtcaccatcacttgccgggccagtcagagtattagtagctggttggcctggtatcagcagaaaccagggaaagcccctaagctcctgatctataaggcgtctagtttagaaagtggggtcccatcaaggttcagcggcagtggatctgggacagaattcactctcaccatcagcagcctgcagcctgatgattttgcaacttattactgccaacagtataatagttattattacagttttggccaggggaccaagctggagatcaaac

SEQ ID NO: 613 - DNA, 334 bp, Artificial Sequence
  Description of Artificial Sequence: Synthetic polynucleotide
cagtctgccctgactcagcctgcctccgtgtctgggtctcctggacagtcgatcaccatctcctgcactggaaccagcagtgacgttggtggttataactatgtctcctggtaccaacaacacccaggcaaagcccccaaactcatgatttatgatgtcagtaatcggccctcaggggtttctaatcgcttctctggctccaagtctggcaacacggcctccctgaccatctctgggctccaggctgaggacgaggctgattattactgcagctcatatacaagcagcatcactctttatgtcttcggaactgggaccaaggtcaccgtcctag

SEQ ID NO: 614 - DNA, 322 bp, Artificial Sequence
  Description of Artificial Sequence: Synthetic polynucleotide
gacatccagatgacccagtctccatcctcactgtctgcatctgtaggagacagagtcaccatcacttgtcgggcgagtcagggtattagcagctggttagcctggtatcagcagaaaccagagaaagcccctaagtccctgatctatgctgcatccagtttgcaaagtggggtcccatcaaggttcagcggcagtggatctgggacagatttcactctcaccatcagcagcctgcagcctgaagattttgcaacttattactgccaacagtataatagttacccattcactttcggccctgggaccaaagtggatatcaaac

SEQ ID NO: 615 - DNA, 325 bp, Artificial Sequence
  Description of Artificial Sequence: Synthetic polynucleotide
gaaatagtgatgacgcagtctccagccaccctgtctgtgtctccaggggaaagagccaccctctcctgcagggccagtcagagtgttagcagcaacttagcctggtaccagcagaaacctggccaggctcccaggctcctcatctatggtgcatccaccagggccactggtatcccagccaggttcagtggcagtgggtctgggacagagttcactctcaccatcagcagcctgcagtctgaagattttgcagtttattactgtcagcagtataataactggcctcggctcactttcggcggagggaccaaggtggagatcaaac

SEQ ID NO: 616 - DNA, 325 bp, Artificial Sequence
  Description of Artificial Sequence: Synthetic polynucleotide
tcctatgagctgacacagccactctcggtggcagtggccccaggagagacggccaggatcacctgttctggagatgcattgtcagaggaatatactcactggtaccagcagaggccaggccaggcctctgttttgattatatataaggacactgagaggccctcagggatccctgagcgattctctggctccacctcagggacaacagtcacgttgaccatcagtggagtccaggcagaagacgaggctgactattattgtcaatcaccggacaccacttctacttatcgggtcttcggcggagggaccaagctgaccgtcctag

SEQ ID NO: 617 - DNA, 322 bp, Artificial Sequence
  Description of Artificial Sequence: Synthetic polynucleotide
gacatccagatgacccagtctccatcctccctgtctgcatctgtaggagacagagtcaccatcacttgccggacaagtcagagcatcagaacttttttaaattggtatcagcagataccagggaaagcccctaagctcctgatctatactgcatccagtttgcagagcggagtcccatcacggttcagtggcagtggatctgggacagatttcactctcaccatcagcagtctgcaacctgaagattttgcgtcttactactgtcaacagggttacactaccccgtacacttttggccaggggaccaagctggagatgaaac

SEQ ID NO: 618 - DNA, 325 bp, Artificial Sequence
  Description of Artificial Sequence: Synthetic polynucleotide
gacatccagatgacccagtctccggcctccctgtctgcatctgttggagacagactcaccatcacttgccgggcaagtcagtccattagcagctatttaaattggtatcagcagaaaccagggaaagcccctaagctcctgatctatgctgcatccagtttgcaaagtggggtcccatcaaggttcagtggcagtggatctgggacagatttcactctcaccatcagcagtctgcaacctgaagattttgcaacttactactgtcaacagagttacagtgcccctcggctcactttcggcggagggaccaaggtggagatcaaac

SEQ ID NO: 619 - DNA, 325 bp, Artificial Sequence
  Description of Artificial Sequence: Synthetic polynucleotide
gacatccagatgacccagtctccttccaccctgtctgcatctctaggagacagagtctccatcacttgccgggccagtcaggatattagtagctgcttggcctggtatcagcagaaaccagggaaagcccctaagctcctgatctatgaggcgtctactttagaaagtggggtcccatcaaggttcagcggcagtggatctgggacagaattcactctcaccatcagcagcctgcagcctgatgattttgcaacttattactgccaacagtataagaattattcaccggtcactttcggccctgggaccaaagtggaaatcaagc

SEQ ID NO: 620 - DNA, 346 bp, Artificial Sequence
  Description of Artificial Sequence: Synthetic polynucleotide
caggctgtgctgactcagccgtcttccctctcagcatctcctggagcatcagccagactcacctgcaccttgcgcagtggcatcaatcttggtagctacaggatattctggcaccagcagaagccagagagccctccccggtatctcctgagctactactcagactcaagtaaccatcagggctctggagtccccagccgcttctctggatccaaagatgcttcgggcaatgcagggattttagtcatctctgggctccagtctgaggatgaggctgactattactgtatgatttggcacagcagtacttatgtcttcggaacggggaccaaggtcaccgtcctag

SEQ ID NO: 621 - DNA, 325 bp, Artificial Sequence
  Description of Artificial Sequence: Synthetic polynucleotide
gaaattgtgttgacgcagtctccaggcaccctgtctttgtctccaggggaaagagccaccctctcctgcagggccagtcagagtgttagcagcagttatttagcctggtaccagcagaaacctggccaggctcccaggctcctcatctatggtgcatccagcagggccattggcatcccagacaggttcagtggcagtgggtctgggacagacttcactctcaccatcagcagactggagcctgaagattttgcagtgtattactgtcagcagtttggtagctcaccgtggacgttcggccaagggaccaaggtggaaatcaaac

SEQ ID NO: 622 - DNA, 328 bp, Artificial Sequence
  Description of Artificial Sequence: Synthetic polynucleotide
gaaattgtgttgacacagtctccagccaccctgtctttgtctccaggggaaagagccaccctctcctgcagggccagtcagagtcttagcaattacttagcctggtaccaacagaaacctggccaggctcccaggctcctcatttatgatgcatccaagagggccactggcatcccagccaggttcagtggcagtgggtctgggacagacttcactctcaccatcagcagcctagagcctgaagattttgcagtttatttctgtcagcagcgtagcaacaggcctccggcgtggacgttcggccaagggaccaaggtggaaatcaaac

SEQ ID NO: 623 - DNA, 328 bp, Artificial Sequence
  Description of Artificial Sequence: Synthetic polynucleotide
gaaattgtgttgacgcagtctccaggcaccctgtctttgtctccaggggaaagagccaccctctcctgcagggccagtcagagtgttagcagcagctacttagcctggtaccagcagaaacctggccaggctcccaggctcctcatctatggtgcatccagcagggccactggcatcccagacaggttcagtggcagtgggtctgggacagacttcactctcaccatcagcagactggagcctgaagattttgcagtgtattactgtcagcagtttggtggctcacccttattcactttcggccctgggaccaaagtggatatcaaac

SEQ ID NO: 624 - DNA, 325 bp, Artificial Sequence
  Description of Artificial Sequence: Synthetic polynucleotide
tcctatgagctgacacagccaccctcggtgtcagtgtccccaggacaaacggccaggatcacctgctctggagatgcattgccaaaaaaatatgcttattggtaccagcagaagtcaggccaggcccctgtgctggtcatctatgaggacaacaaacgaccctccgggatccctgagagattctctggctccagctcagggacaatggccaccttgactatcagtggggcccaggtggaggatgaagctgactactactgttactcaacagacagcagtggtaatcattgggtgttcggcggagggaccaagctgaccgtcctag

SEQ ID NO: 625 - DNA, 340 bp, Artificial Sequence
  Description of Artificial Sequence: Synthetic polynucleotide
gatattgtgatgacccagactccactctccctgcccgtcacccctggagagccggcctccatctcctgcaggtctagtcagagcctcttggatagtgatgatggaaacacctatttggactggtacctgcagaagccagggcagtctccacaactcctgatctatacgctttcctatcgggcctctggagtcccagacaggttcagtggcagtgggtcaggcactgatttcacactgacaatcagcagggtggaggctgaggatgttggagtttattactgcatgcaacgtatagagtttcctttcactttcggcggagggaccaaggtggagatcaaac

SEQ ID NO: 626 - DNA, 334 bp, Artificial Sequence
  Description of Artificial Sequence: Synthetic polynucleotide
cagtctgtgctgacgcagccgccctcagtgtctggggccccagggcagagggtctccatctcctgcactgggagcagctccaacatcggggcaggttatgatgtacactggtaccagcagcttccaggaacagcccccaaactcctcatctatgctaacaacaatcggccctcaggggtccctgaccgattctctggctccaagtctggcacctcagcctccctggccatcactggactccaggctgaggatgaggctgattattactgccagtcctatgacaccagcctgagtggtttggttttcggcggagggaccaagctgaccgtcttag

SEQ ID NO: 627 - DNA, 319 bp, Artificial Sequence
  Description of Artificial Sequence: Synthetic polynucleotide
tcctatgagctgactcagccaccctcagtgtccgtgtccccaggacagacagccagcatcacctgctctggagataaattgggggataaatatgcttgctggtatcagcagaagccaggccagtcccctgtactggtcatctatcaagatagcaagcggccctcagggatccctgagcgattctctggctccaactctgggaacacagccactctgaccatcagcgggacccaggctatggatgaggctgactattactgtcaggcgtgggacagcagcactggagtcttcggaactgggaccaaggtcaccgtcctag

SEQ ID NO: 628 - DNA, 322 bp, Artificial Sequence
  Description of Artificial Sequence: Synthetic polynucleotide
gacatccagatgacccagtctccatcctccctgtctgcatctgtaggagacagagtcaccatcacttgccgggcaagtcagagcattagcagctatttaaattggtatcagcagaaaccagggaaagcccctaagctcctgatctatgctgcatccggtttgcaaagtggggtcccatcaaggttcagtggcagtggatctgggacagatttcattctcaccatcagcagactgcaacctgaagattttgcaacttactactgtcaacagagttacagtaccccattcactttcggccctgggaccaaagtggatatcaaac

SEQ ID NO: 629 - DNA, 334 bp, Artificial Sequence
  Description of Artificial Sequence: Synthetic polynucleotide
cagtctgccctgactcagcctcgctcagtgtccgggtctcctggacagtcagtcaccatctcctgcactggaaccagcagtgatgttggtgcttataactatgtctcctggtaccaacaacacccaggcaaagcccccaatctcatcatttatgatgtcaataagcggccctcaggggtccctgatcgcttctctggctccaagtctggcaacacggcctccctgaccatctctgggctccaggctgaggatgaggctgattattactgctgctcatttgcaggcagctacactttttgggtgttcggcggagggaccaagctgaccgtcctag

SEQ ID NO: 630 - DNA, 322 bp, Artificial Sequence
  Description of Artificial Sequence: Synthetic polynucleotide
gacatccagatgacccagtctccatcctccctgtctgcatctgtaggagacagagtcaccttgacttgccggacaagtcagagcatcagaacttttttaaattggtatcagcagaaaccagggaaagcccctaagctcctgatttctgaatcatccagtttacaaagtggggtcccatcaaggttcagtggcagtggatctgggacagatttcactctcaccatcaacagtctgcaacctgaagattttgcaacttactactgtcaacagggttacactgtcccgtacacttttggccaggggaccaggctggagatcacac

SEQ ID NO: 631 - DNA, 334 bp, Artificial Sequence
  Description of Artificial Sequence: Synthetic polynucleotide
aattttatgctgactcagccgcactctgtgtcggagtctccggggaagacggtaaccatctcctgcacccgcagcagtggcagtattgccagcaactatgtgcagtggtaccagcagcgcccgggcagtgtccccaccattgtgatctatgaggataaccaaagaccctctggggtccctgatcggttctctggctccatcgacagctcctccaactctgcctccctcaccatctctggactgaagactgaggacgaggctgactactactgtcagtcttatgatagcagcaacctttgggtgttcggcggagggaccaagctgaccgtcctag

SEQ ID NO: 632 - DNA, 319 bp, Artificial Sequence
  Description of Artificial Sequence: Synthetic polynucleotide
tcctatgagctgactcagccaccctcagtgtccgtgtccccaggacagacagccagcatcacctgctctggagataaattgggggataaatatgtttgttggtatcagcagaagccaggccagtcccctgtgctggtcatctatcaagatagcaagcggcccacagggatccctgagcgattctctggctccaactctgggaacacagccactctgaccatcagcgggacccaggctatggatgaggctgactattactgtcaggcgtggggcagcagcactggagtcttcggaactgggaccaaggtcaccgtcctag

SEQ ID NO: 633 - DNA, 331 bp, Artificial Sequence
  Description of Artificial Sequence: Synthetic polynucleotide
cagtctgccctgactcagcctgcctccgtgtctgggtctcctggacagtcgatcaccatctcctgcactggaaccagcagtgacgttggtggttataactttgtctcctggtaccaacaacacccaggcaaagcccccaaactcatgatttatgatgtcagtaatcggccctcaggggtttctaatcgcttctctggctccaagtctggcaacacggcctccctgaccatctctgggctccaggctgaggacgaggctgattattattgcaactcatatacaagcagcacctcttatgtcttcggaactgggaccaaggtcaccgtcctgg

SEQ ID NO: 634 - DNA, 325 bp, Artificial Sequence
  Description of Artificial Sequence: Synthetic polynucleotide
gaaattgtgttgacgcagtctccaggcaccctgtctttgtctccaggggaaagagccaccctctcctgcagggccagtcagagtgttagcagcagctacttagcctggtaccagcaaaaacctggccaggctcccaggctcctcatctatggtgcatccagcagggccactggcatcccagacaggttcagtggcagtgggtctgggacagacttcactctcaccatcagcagactggagcctgaagattttgcagtgtattactgtcagcactatggtacgtcaccgtggacgttcggccaagggaccaaggtggaaatcaaac

SEQ ID NO: 635 - DNA, 304 bp, Artificial Sequence
  Description of Artificial Sequence: Synthetic polynucleotide
cagtctgtgctgactcagtcagaggttccctgaatgacagagatttgttttaggaacattgtgtgacacccttctgagacactgtggaccatgtctgaggggtcctgcactggcactgagggggcctgacccctcttcatacactgaggtcagggggctcccaggtacacaacaggatgctgacctcctgccgctcgcccacccacaggccagcccaatgctaccccctcggtcactctgttcccacccaagaggatttaatatagagctgcacggaatgacaggacgaatggctcggggtgtg

SEQ ID NO: 636 - DNA, 319 bp, Artificial Sequence
  Description of Artificial Sequence: Synthetic polynucleotide
tcctatgagctgactcagccaccctcagtgtccgtgtccccaggacagacagccagcatcacctgctctggagataaattgggggataaatatgcttgctggtatcagcagaagccaggccagtcccctgtcctggtcatctatcaagatagcaagcggccctcagggatccctgagcgattctctggctccaactctgggaacacagccactctgaccatcagcgggacccaggctatggatgaggctgactattactgtcaggcgtgggacagcagcactggggtattcggcggagggaccaagctgaccgtcctag

SEQ ID NO: 637 - DNA, 325 bp, Artificial Sequence
  Description of Artificial Sequence: Synthetic polynucleotide
tcctatgagctgacacagccactctcggtgtcagtgtccccaggacaaacggccaggatcacctgctctggagatgcattgccaaaaaaatatgcttattggtaccagcagaagtcaggccaggcccctgtgctggtcatctatgaggacagcaaacgaccctccgggatccctgagagattctctggctccagctcagggacaatggccaccttgactatcagtggggcccaggtggaggatgaagctgactactactgttactcaacagacagcagtggtaatcatagggtgttcggcggagggaccaagctgaccgtcctag

SEQ ID NO: 638 - DNA, 322 bp, Artificial Sequence
  Description of Artificial Sequence: Synthetic polynucleotide
gacatccagatgacccagtctccttccaccctgtctgcttctgtaggagacagagtcaccatcacttgccgggccagtcagagtattagtagctggttggcctggtatcagatgaaaccagggaaagcccctaagctcctgatctataaggcgtctagtttagaaaatggggtcccatcaaggttcagcggcagtggatctgggacagaattcactctcaccatcagcagcctgcagcctgatgactttgcaacttattattgccaacagtataatagttactctctctctttcggcggtgggaccaaggtagagatcaaac

SEQ ID NO: 639 - DNA, 319 bp, Artificial Sequence
  Description of Artificial Sequence: Synthetic polynucleotide
tcctatgagctgactcagccaccctcagtgtccgtgtccccaggacagacagccagcatcacctgcgctggagataaattgggggataaatatgcttgctggtatcagcagaagccaggccagtcccctgtgctggtcatctatcaagatagcaagcggccctcagggatccctgagcgattctctggctccaactctgggaacacagccactctgaccatcagcgggacccaggctatggatgaggctgactattactgtcaggcgtgggacagcaggaatgtggtattcggcggagggaccaagctgaccgtcctag

SEQ ID NO: 640 - DNA, 334 bp, Artificial Sequence
  Description of Artificial Sequence: Synthetic polynucleotide
cagtctgtgttgacgcagccgccctcagtgtctgcggccccaggacagaaggtcaccatctcctgctctggaagcagctccaacattgggagtaattatgtatcctggtaccagcagctcccaggaacagcccccaaactcctcatctttaaaaataatgagcgaccctcagggattcctgaccgattctctggctccaagtctggcacgtcagccaccctgggcatcgccggactccagactggggacgaggccgattattactgcgaaacatgggatagcagcctgagtgctggaaagatattcggcggagggaccaagctgaccgtcctag

SEQ ID NO: 641 - DNA, 328 bp, Artificial Sequence
  Description of Artificial Sequence: Synthetic polynucleotide
tcctatgagctgacacagccaccctcggtgtcagtgtccccaggacagacggccaggatcacctgctctggagattcattgccaaagcaatatgcttattggtaccagcagaagccaggccaggcccctgtgctggtgatatataaagacaatgagagaccctcagggatccctgagcgattctctggctccagctcagggacaacagtcacgttgaccatcagtggagtccaggcagaagatgaggctgactattactgtcaatcagcagacagcagtggtacttatccgggggtcttcggaactgggaccaaggtcaccgtcctag

SEQ ID NO: 642 - DNA, 319 bp, Artificial Sequence
  Description of Artificial Sequence: Synthetic polynucleotide
tcctatgagctgactcagccaccctcagtgtccgtgtccccaggacagacagccagcttcacctgctctggagataaattgggggataaatatgcttgctggtatcagcagaagccaggccagtcccctgtgctggtcatctatcaagatagcaagcggccctcagggatccctgagcgattctctggctccaactctgggaacacagccactctgaccatcagcgggacccaggctatggatgaggctgactattactgtcaggcgtgggacagcagcactgtggtattcggcagagggaccaagctgaccgtcctag

SEQ ID NO: 643 - DNA, 322 bp, Artificial Sequence
  Description of Artificial Sequence: Synthetic polynucleotide
gacatccagatgacccagtctccatcctccctgtctgcatctattggagacagagtcaccatcacttgccgggcaagtcagagcattagcagctatttaaattggtatcagcagaaaccagggaaagcccctaagctcctgatctatgctgcatccagtttgcaaaatggggtcccatcaaggttcagtggcagtggatctgggacagatttcactctcaccatcagcagtctgcaacctgaagattttgcaacttactactgtcaacagagttacagtaccctttacagttttggccaggggaccaagctggagatcaaac

SEQ ID NO: 644 - DNA, 325 bp, Artificial Sequence
  Description of Artificial Sequence: Synthetic polynucleotide
tcttctgagctgactcaggaccctgctgtgtctgtggccttgggacagacagtcaccatcacatgccggggagacagcctcagaacctcttatgcaagctggtaccagcagaagccaggacaggcccctgctcttgccatttatggcaagaacaaccggccctcggggatcccagaccgcttctctggctcctactcaggaagtatagcttccttgaccatcactggggctcaggcggaagatgaggctgactattactgtaactcccgggacagcagtggagaccatgtcccattcggcggagggaccaggctgaccgtcctaa

SEQ ID NO: 645 - DNA, 328 bp, Artificial Sequence
  Description of Artificial Sequence: Synthetic polynucleotide
cagtctgccctgactcagcctgcctccgtgtctgggtctcctggacagtcgatcaccatctcctgcactggaaccagcagtgatgttgggagttataaccttgtctcctggtaccaacagcacccaggcaaagcccccaaactcatgatttatgaggtcagtaagcggccctcaggggtttctaatcgcttctctggctccaagtctggcaacacggcctccctgacaatctctgggctccaggctgaggacgaggctgattattactgctgctcatatgcaggtagtctttatgtcttcggaactgggaccaaggtcaccgtcctag

SEQ ID NO: 646 - DNA, 322 bp, Artificial Sequence
  Description of Artificial Sequence: Synthetic polynucleotide
gccatccggatgacccagtctccatcctcattctctgcatctacaggagacagagtcaccatcacttgtcgggcgagtcagggtattagcagttatttagcctggtatcaccaaaaaccagggaaagcccctaagctcctgatctatgctgcatccactttgcaaagtggggtcccatcaaggttcagcggcagtggatctgggacagatttcactctcaccatcagctgcctgcagtctgaagattttgcaacttattactgtcaacagtattatagttaccctccgacgttcggccaagggaccaaggtggaaatcaaac

SEQ ID NO: 647 - DNA, 322 bp, Artificial Sequence
  Description of Artificial Sequence: Synthetic polynucleotide
gccatccggatgacccagtctccatcctcattctctgcatctacaggagacagagtcaccatcacttgccgggcgagtcagggtattagcagttatttagcctggtatcaccaaaaaccagggaaagcccctaagctcctgatctatgctgcatccactttgcaaagtggggtcccatcaaggttcagcggcagtggatctgggacagatttcactctcaccatcagctgcctgcagtctgaagattttgcaacttattactgtcaacagtattatagttaccctccgacgttcggccaagggaccaaggtggaaatcaaac

SEQ ID NO: 648 - DNA, 325 bp, Artificial Sequence
  Description of Artificial Sequence: Synthetic polynucleotide
tcctatgagctgacacagccaccctcggtgtcagtgtccccaggacagacggccaggatcacctgctctggagatgcattgccaaaggaatacgcttattggtaccagcagaagccaggccaggcccctgtgatggtgatatataaagacagtgagaggccctcagggatccctgagcgattctctggctccagctcagggacaacagtcaccttgaccatcagtggagtccaggcagaagacgaggctgactattactgtcaatcagcagatagcagtggtacttatgtggtcttcggcggagggaccaagctgaccgtcctag

SEQ ID NO: 649 - DNA, 322 bp, Artificial Sequence
  Description of Artificial Sequence: Synthetic polynucleotide
tcctatgagctgactcagccaccctcagtgtccgtgtcccctggacagacagccagcatcacctgctctggagataaattgggggataaatatgcttactggtatcagcagaggccaggccagtcccctgtgctggtcatctatcaagataacaagcggccctcagggatccctgagcgattctctggctccaactctgggaacacagccactctgaccatcagcgggacccaggctatggatgaggctgactattactgtcaggcgtgggacagcagcactgggaatgtcttcggaactgggaccaaggtcaccgtcctaa

SEQ ID NO: 650 - DNA, 325 bp, Artificial Sequence
  Description of Artificial Sequence: Synthetic polynucleotide
tcctatgagctgacacagccactctcggtggcagtggccccaggagagacggccaggatcacctgttctggagatgcattgtcagaggaatatactcactggtaccagcagaggccaggccaggcccctgttttgattatatataaggacactgagaggccctcagggatccctgagcgattctctggctccacctcagggacaacagtcacgttgaccatcagtggagtccaggcagaagacgaggctgactattattgtcaatcaccggacaccacttctacttatcgggccttcggcggagggaccaagctgaccgtcctag

SEQ ID NO: 651 - DNA, 325 bp, Artificial Sequence
  Description of Artificial Sequence: Synthetic polynucleotide
gaaatagtgatgacgcagtctccagccaccctgtctgtgtctccaggggaaagcgccaccctctcctgcagggccagtcagagtgttagcagcaacttagcctggtaccagcagaaacctggccaggctcccaggctcctcatctatggtgcatccaccagggccactggtatcccagccaggttcagtggcagtgggtctgggacagagttcactctcaccatcagcagcctgcagtctgaagattttgcagtttattactgtcagcagtattataactggcctccgtggacgttcggccaagggaccaaggtggaaatcaaac

SEQ ID NO: 652 - DNA, 322 bp, Artificial Sequence
  Description of Artificial Sequence: Synthetic polynucleotide
gacatccagttgacccagtctccatccttcctgtctgcatctgtaggagacagagtcaccatcacttgccgggccagtcagggcattagcagttatttagcctggtatcagcaaaaaccagggaaagcccctaagctcctgatctatgctgcatccactttgcaaagtggggtcccatcaaggttcagcggcagtggatctgggacagaattcactctcacaatcagcagcctgcagcctgaagattttgcaacttattactgtcaacagattaatagttaccctataaccttcggccaagggacacgactggagattaaac

SEQ ID NO: 653 - DNA, 325 bp, Artificial Sequence
  Description of Artificial Sequence: Synthetic polynucleotide
gaaattgtgttgacgcagtctccaggcaccctgtctttgtctccaggggaaagagccaccctctcctgcagggccagtcagagtgttagcagcagctacttagcctggtaccagcagaaacctggccaggctcccaggctcctcatctatggtgcatccagcagggccactggcatcccagacaggttcagtggcagtgggtctgggacagacttcactctcaccatcagcagactggagcctgaagattttgcagtgtattactgtcagcagtatggtagctcacgaatcactttcggccctgggaccaaagtggatatcaaac

SEQ ID NO: 654 - DNA, 322 bp, Artificial Sequence
  Description of Artificial Sequence: Synthetic polynucleotide
tcctatgagctgacacagccaccctcggtgtcagtgtccccaggacagacggccaggatcacctgctctggagatgcttttcccaagcgatatggttattggtaccagcagaagccaggccaggcccctgtgttggtgatatataaggacactgagcggccctcagggattcctgagcgattctctggctccagctcagggacaacagtcatgttgaccatcagtggagtccaggcagaagatgaggctgactattactgtcaatcaccagaccgcagtggtgggggggtgttcggcggagggaccaagctgaccgtcctag

SEQ ID NO: 655 - DNA, 325 bp, Artificial Sequence
  Description of Artificial Sequence: Synthetic polynucleotide
gacatccagatgacccagtctccttccaccctgtctgcatctgtaggagacagagtcaccatcacttgccgggccagtcagagtattagtagctggttggcctggtatcagcagaaaccagggaaagcccctaagctcctgatctataaggcgtctagtttagaaagtggggtcccatcaaggttcagcggcagtggatctgggacagaattcactctcaccatcagcagcctgcagcctgatgattttgcaacttattactgccaacagtataatagttattatccgtggacgttcggccaagggaccaaggtggaaatcaaac

SEQ ID NO: 656 - DNA, 328 bp, Artificial Sequence
  Description of Artificial Sequence: Synthetic polynucleotide
gaaatagtgatgacgcagtctccagccaccctgtctgtgtctccaggggaaagagccaccctctcctgcagggccagtcagagtgttggcagcaacttagcctggtaccagcagaaacctggccaggctcccaggctcctcatctatggtgcatccaccagggccactggtatcccagccaggttcagtggcagtgggtctgggacagagttcactctcaccatcagcagcctgcagtctgaagattttgcagtttattactgtcagcagtataataactggcctccggcgctcactttcggcggagggaccaaggtggagatcaaac

SEQ ID NO: 657 - DNA, 369 bp, Artificial Sequence
  Description of Artificial Sequence: Synthetic polynucleotide
gaagtgcagctggtggagtctgggggaggcttggtacagcctggcaggtccctaagactctcctgtgtagcctctggattcagccctggtgattatgccatgcactgggtccggcaagctccagggaagggcctggagtgggtctcaggtattagttggaacagtgttagtattgactatgcggactctgtgaagggccgattcaccatctccagagacaacgccaagaactccctgtatctgcaaatgaacagtctgagacctgaggacacggccttgtattactgcgccagagggggttttaagagtggtttttatatccacggcatggacgtctggggccaagggaccacggtcaccgtctcctca

SEQ ID NO: 658 - DNA, 379 bp, Artificial Sequence
  Description of Artificial Sequence: Synthetic polynucleotide
caggtgcagctggtggagtctgggggaggcgtggtccagcctgggaggtccctgagactctcctgtacagcctctggattcaccttcagtcaatatggcatgcattgggtccgccaggctccaggcaaggggctggagtgggtggcaggaatgtcatatgatggaaatgataaaaattacttagactccgtgaagggccgattcagcatctccagagacgattccaagagcacgcagtatctgcaaatgaacagcctgagagctgaggacacggctgtttattactgtgcgaaaaaggggtccccgtattgtggtgttgactgctataaaggctactttgactattggggccagggaatcctggtcatcgtctcctcag

SEQ ID NO: 659 - DNA, 366 bp, Artificial Sequence
  Description of Artificial Sequence: Synthetic polynucleotide
caggtgcagctggtgcagtctggggctgaggtgaggaagcctggggcctcagtgaaagtttcctgcaaggcttctggatacaccttcaccgactactatatccactgggtgcgccaggcccctggacaagggcttgagtggatgggaattatcaaccctgaagctggtagcacaacttccgcacagaggttccagggcagactcatcatgaccacggacacgtccgcgagtacagtctacatggagttgaacagcctgacatctgcggacacggccgtttattactgtgcgagagattactttctgataccagctgcaaatacaatggaagtctggggccaagggaccacggtcaccgtctcatca

SEQ ID NO: 660 - DNA, 393 bp, Artificial Sequence
  Description of Artificial Sequence: Synthetic polynucleotide
gaggtgcagctggtggagtctgggggaggcatggtacagccgggggggtccctgagactctcctgtgcagcctctggattcacctttaacaactatgccatgaactgggtccgccaggctccagggaaggggctggagtgggtctcagctattagtggtagtgggattaggacatactacgcagagtccgtgaagggccgggtcaccatctccagagacaattccaagagcactctgtatctgcaaatgaacagcctgagagccgaggacacggccgtatattactgtgcgaaagatttgttttacgatttttggagtggtttcgattttgggccgggcgaatcgtttggtatggacgtctggggccaagggaccacggtcaccgtctcctca

SEQ ID NO: 661 - DNA, 364 bp, Artificial Sequence
  Description of Artificial Sequence: Synthetic polynucleotide
gaggtgcagctggtggagtctgggggaggcttggtccagcctggggggttcctgagactctcttgttcagcctctggattcagcttcagaacctattctatgcactgggtccgccaggctccagggaagggcctggaacatgtttcagctatcagtcgtaatggcgatatcacatactacgcagactccatggagggcagattcaccatctccagagacaattccaagaacacgctgtatcttcaaatgagcagtctgagacctgaggacacggctgtgtattactgtgtgaaagacaaagtgactacgatctttgatgtttttgatttgtggggccaagggacaatggtcaccgtctcttcag

SEQ ID NO: 662 - DNA, 393 bp, Artificial Sequence
  Description of Artificial Sequence: Synthetic polynucleotide
gaggtgcagctggtggagtctgggggaggcttggtacagcctggggggtccctgagactctcctgtgcagcctctggatttacctatagcacctatgccatgagttgggtccgccaggctccagggaaggggctggagtgggtctcagctattagtggtgatggtggcagaacatactacgcagactccgtgaagggccggttcaccatctccagagacaattccaagaccatactgtatctgcaggtgaacagcctgagagtcgaggacacggccgtatattactgtgcgaaactggaggggggccattactatggttcggggagttattacatttctacacccctcgctatggacgtctggggccaagggaccacggtcaccgtctcctca

SEQ ID NO: 663 - DNA, 394 bp, Artificial Sequence
  Description of Artificial Sequence: Synthetic polynucleotide
caggtgcagctggtgcagtctggggctgaggtgaagaagcctggggcctcagtgcaggtttcctgccaggcatctgcaaacaccttcaccaaccactatatacactgggtgcgacaggcccctggacaaggacttgagtggatgggaataatctaccctactggtggaaatacaatctacgcacaggggttccagggcagagtcaccatgaccagggacacgtccttgaacacaatctatttggagctgagcagcctgagatctgaggacacggccgtgtattattgtgccagagatgttcgggttgacgattcttggagtggttatgatctcctatccggggggacctactttgactattggggccagggaaccctggtcaccgtctcctcag

SEQ ID NO: 664 - DNA, 355 bp, Artificial Sequence
  Description of Artificial Sequence: Synthetic polynucleotide
caggtccagctggtgcagtctgggcctgaggtgaagaagcctgggtcctcggtgaaggtctcctgcgaggcttctggagacggactcagcaactatggtatctcctgggtgcggcaggcccctggacaaggccttgagtggatgggaaggatcatccctatccttggtataacaaactacgcacagaggttccagggcagagtcaccattaccgtggaactcaccagcacagtctacatggagctgagcagcctgagatctgaagacacggccgtatatttctgtgcgagagaaagatacaataccagaaactttgactattggggccagggaacccaggtcaccgtctcctcag

SEQ ID NO: 665 - DNA, 364 bp, Artificial Sequence
  Description of Artificial Sequence: Synthetic polynucleotide
caggtgcagctggtgcagtctgggggtgaggcgaagaagcctggggcctcagtgaaggtctcctgcaaggcttctggatacaccttcaacactcatgatatcaactgggtgcgacagaccactggacaagggcttgagtggatgggatgggtgaaccctagcagtgggaacacaggctattcacataagtttcagggcagagtcaccatgaccacagacacctccataaacacagccttcatggaactgagcggcctgagatccgaggacacggccatttattactgtgcgagaggcccgagtggatactactatggttccggggacttctggggccagggaaccctagtcaccgtctcctcag

SEQ ID NO: 666 - DNA, 373 bp, Artificial Sequence
  Description of Artificial Sequence: Synthetic polynucleotide
gaagtgcagctggtggagtctgggggaggcttggtacagcctggcaggtccctgagactctcctgtacagcctctggattcacctttgatgattatgccatacactgggtccggcaagctccagggaagggcctggagtgggtctcaggtgtcgattggaatggtggtaccatagactatgcggactctgtgaagggccgattcaccatctccagagacaacgccaagaactccctgtatctgcaaatgaacagtctgagacctgaggacacggccttctattactgtgcaaaaggggattgtagtagcaccagctgcgacgacccttactttgactactggggccagggaaccctggtcaccgtctcctcag

SEQ ID NO: 667 - DNA, 375 bp, Artificial Sequence
  Description of Artificial Sequence: Synthetic polynucleotide
caggtccagctggtgcagtctggggctgaggtaaggaagcctgggtcctcggtgaaggtctcctgcaaggcttctggaggcaccttcagcagctacgctatcagctgggtgcgacaggcccctggacaaggacttgagtggatgggagggatcatccctatctttggtacaacaaactacgcacagaggttccaggacagagtcacgattaccgcggacgaatccacgagaacagcctacatggagctgaggagcctgagatctgaagacacggccgtatattattgtggtcatatggcagcaactggtaggatttccttctactaccacggtttggacgtctggggccaagggaccacggtcaccgtctcctca

SEQ ID NO: 668 - DNA, 373 bp, Artificial Sequence
  Description of Artificial Sequence: Synthetic polynucleotide
caggtacagctgcagcagtcaggtccaggactggtgaagccctcgcagaccctctcactcacctgtggcatctccggggacagtgtctctagcagctatgctgtttggaactggatcaggcagtccccatcgagaggccttgagtggctgggaaggtcatactacaggtccaagtggtatattgattatgcagaatctgtgaaaggtcgaataaccatcaacccagacacatccaagaaccaattctccctgcagctgaagtctctgactcccgaggacacggctgtgtattactgtgcaaggtcccctgtcgatgttttgccgggttatttcacctactggggccagggaaccctggtcaccgtctcatcgg

SEQ ID NO: 669 - DNA, 384 bp, Artificial Sequence
  Description of Artificial Sequence: Synthetic polynucleotide
cagctgcagctgcaggagtcgggcccaggactggtgaagccttcggagaccctgtccctcacctgcacagtctctggtggctccatcaacaataatatttactactggggctggatccgccagcccccagggaaggggctggagtggattgggagtatctattatagtgggagcacctactacaacccgtccctcaggagtcgagtcagcatttccgtcgacacgtccaagaacgagttctccctgaggctgagctctgtgaccgccgcagacacggctgtgtattactgtgcgagaccgggggtgtattgtagtggtgccagctgctattattacttaaatatggacgtctggggccaagggaccacggtcaccgtctcctca

SEQ ID NO: 670 - DNA, 382 bp, Artificial Sequence
  Description of Artificial Sequence: Synthetic polynucleotide
caggtgcagctgcaggagtcgggcccaggactggtgaagccctcacagaccctgtccctcacctgctctgtctctggtggctccctcagtaatgctggttactactggagttggatccgccaacacccagggaagggcctggagtggattgggtacatctattacactggggacacctactacaacgcgtccctcaagggtcgagcctccatgtcactggacatgtctgagaaccgattctccctgagtctgacttctgtcactgacgcggacacggccgtctactactgtacgagagcaataagatattgtctcggaggttactgccaccacccctggttcgacccctggggccagggagtcctggtcgtcgtctcctcag

SEQ ID NO: 671 - DNA, 370 bp, Artificial Sequence
  Description of Artificial Sequence: Synthetic polynucleotide
caggtgcagctggtgcagtctggggctgaggtgcagaagcctggggcctcagtgaaggtctcttgccaggcttctggatccaccttcagtaactctgatatcaactgggtgcgacaggccattggacaagggcttgaatggatgggatgggtgaaccctaacagtggcaatacaggctatgcacacaagttccagggcagagtcaccatgaccagggacacctccaggaacacagtctacatggaactgagcagcctgacctctgaagacacggccgtctattactgtgcgaaaggcccggacgattattggagtggttatggccggttcgacccctggggccagggaaccctcgtcaccgtctcctcag

SEQ ID NO: 672 - DNA, 355 bp, Artificial Sequence
  Description of Artificial Sequence: Synthetic polynucleotide
caggttcagctggtgcagtctggaggtgaagtgaagaagcctggggcctcagtgaacgtctcctgcaaggcttctggttacagctttaggacctatggtgtcggttgggtgcgacaggcccctggacaagggcttgagtggatgggatggatcggcgcaaataatgatatcacagactatgcacagaagtttcagggcagactcactttgaccacagacccatccacgagcacagcctatatggacttgaggagcctgacatctgacgacacgggtgtttattactgcgcgcgagccggcccggaggttccatttgaccactggggccagggaaccctggtcaccgtctcctcgg

SEQ ID NO: 673 - DNA, 346 bp, Artificial Sequence
  Description of Artificial Sequence: Synthetic polynucleotide
caggtgcagctggtggagtctgggggaggcgtggtccagcctgggaggtccctgagactctcctgtgcagcctctggattcaccttcagtaactatccaatgcactgggtccgccaggctccaggcaaggggctggagtgggtggccgttatatcttttgatggaagcgccacgtactacgcagactccgtgaagggccgattcaccatctccagagacaattttaagaacacattgtttctgcaaatgagcagcctgagacctcaggacacggctctgtattactgtgcgagagatcaacttcttgactattggggccagggaaccctggtcaccgtctcctcag

SEQ ID NO: 674 - DNA, 385 bp, Artificial Sequence
  Description of Artificial Sequence: Synthetic polynucleotide
gaggtgcagctggtggagtctgggggaggcttggtacagccgggggggtccctgagagtctcctgtgcagcctctggattcacctttagcaactatgccatggcctgggtccgccaggctccagggaaggggctagagtgggtctcaacaattagtggtagtggttataccacatcctccgcagactccgtgaagggccggttcaccatctccagagacaattccaagagcacactatatctccaaatgaacagcctgagcgccgaggacacggccgtatactactgtgcgcgagattggccgaccaatgtaagatattgtagtagtgatatatgtccactctttgactactggggccaggggaccctggtcaccgtctcctcag

SEQ ID NO: 675 - DNA, 361 bp, Artificial Sequence
  Description of Artificial Sequence: Synthetic polynucleotide
caggtgcagctacagcagtggggcgcaggactgttgaagccttcggagaccctgtccctcacctgcgctgtctatggtgggtccttcagtggttacttctgggttcgcagttccactggtgacgaggttcagctggtggagtctggggaaatcaatcatagtggaagcaccaactacaacccgtccctcaagagtcgagtcaccatatcagtagacacgtccaagaaccagttctccctgaagctgagctctgtgaccgccgcggacacggctgtgtattactgtgcgagaatcgaatacagctatggccggagggggcttgactactggggccagggaaccctggtcaccgtctcctcag

SEQ ID NO: 676 - DNA, 388 bp, Artificial Sequence
  Description of Artificial Sequence: Synthetic polynucleotide
caggtgcagctacagcagtggggcgcaggactgttgaagccttcggagaccctgtccctcacctgcgctgtctatggtgggtccttcagtggttaccactggaactggatccgccagtccccagggaagggactggagtggatcggggaaatcaaccatgatggaagcaccaactacaatccgtctctcaagagtcgagtcagcatatcagcagacacgtccaagagccagttctccctgaagttgaactctgtgaccgccgcggacacggctgtgtattattgtgcgagagacctttcaaggacataccgattccagtattatgatagtggtgtgactgaagcttttgatatctggggccaagggacaatggtcaccgtctcttcag

SEQ ID NO: 677 - DNA, 382 bp, Artificial Sequence
  Description of Artificial Sequence: Synthetic polynucleotide
caggtgcagctacagcagtggggcgcaggactgttgaggccttcggagaccctgtccctcacatgcgctgtctatggtgggtccttcagtggtttctcctggagctgggtccgccagcccccagggaaggggctggagtggattggagagatcagtcatgatggtaccaccaacttcgactcgtccctcaagagccgagtcaccatgtcactggacacgtccaagaatcacttctccttgaacctgaactctgtgaccgccgcagacacggctgtctactactgtgcgagagtcccgacggttacggtttatggagtggacgttataaatgtcagttggttcgacccctggggccagggaaccctggtcaccgtctcctcag

SEQ ID NO: 678 - DNA, 379 bp, Artificial Sequence
  Description of Artificial Sequence: Synthetic polynucleotide
caggtgcagctgcaggagtcgggcccaggactggtgaggccttcggggaccctgtccctcacctgcgctgtctcaggtgcctccatcagtagtagtagctggtggagttgggtccgccagcccccagggggggtgctggagtggattggggaaatctctcccagtgggagcaccagctacaggccgtcctttaggagtcgaattaccatgtctgcagacaagtccaggaaccacctctccctgaaactgagctctgtgaccgccgcggacacggccgtctattactgtgcgagggcccagccgaacgatttttggagtggttattatacggcggcttttgatatgtggggccaagggacagtggtcatcgtctcttcag

SEQ ID NO: 679 - DNA, 391 bp, Artificial Sequence
  Description of Artificial Sequence: Synthetic polynucleotide
gaggtgcagctggtggagtctgggggaggcttggttcagcctggggggtccctgagactctcctgtgcagcctctggattcaccttcagcggctttgccatgggctgggtccgccaggctccagggaagggactggagtgggtctccagtatttctggcagtgctggtggtggtaagacatactatgcagactccgtgaagggccggttcaccatctccagagacaatcttaagaacaccctgtctctacaaatgaacagcctgagagccgaggacacggccatatattactgtgcgagagacttccatgttcgatttttgaattactacacgccagtgggaggtgcttttgatatctggggccaagggacaatggtcaccgtctcttcag

SEQ ID NO: 680 - DNA, 370 bp, Artificial Sequence
  Description of Artificial Sequence: Synthetic polynucleotide
caggtgcagctggtggagtctgggggagacttggtcaaacctggagggtccctgagactctcctgtgaagcatctggattcatcttcagtgaatattatatgagctggatacgccaggctccagggaaggggctggagtgggtttcctacattacgggtagtggcaggaccattcactacgcagactctgtgaagggccgattcaccgtctccagggacaacgccaagaactcagtttatctgcagctgaacaacctgagagtcgaagacacggccgtctattactgtgcgaggggccatcgatttttggagttccccctaaactacctcgacccctggggccagggaaccctggtcgccgtctcctcag

SEQ ID NO: 681 - DNA, 394 bp, Artificial Sequence
  Description of Artificial Sequence: Synthetic polynucleotide
gaggtgcagctggtggagtctgggggaggcttggtacagcctggggggtccctgagactctcctgtgaagcctctggattcacctttagcaactatgccatgagctgggtccgccaggctccagggaaggggctgcagtgggtctcagccatcagttttagtggtgggagcacatattacgcagcctccgtgaggggccggttcaccatctccagagacaattccaagaacacgctgtatctgcaaatgaacaacgtgagagccgaagacacggccgtatatttctgtgcgaaagacgcggggtctgattccctttgggggaatcttcgttataccgacgtagggcggtactttgactactggggccagggaaccgtggtctccgtctcctcag

SEQ ID NO: 682 - DNA, 337 bp, Artificial Sequence
  Description of Artificial Sequence: Synthetic polynucleotide
caggtgcagctgcaggagtcgggcccaggactggtgaagccttcggaaaccctgtccctcacctgcactgtctctggtggctccatcagtaattactactggagttggctccggcagtccccaggcaagggactggagtggattggctatatctatgacagtgggaccaccaactacaacccctccctcaagagtcgagtcaccatatcaatagacacgtctaagaaccacttctccctgaagctgaactctgtgaccgcagcggacacggccgtttattactgtgcgaggggatttgactactggggccagggaaccctagtcaccgtctcctcgg

SEQ ID NO: 683 - DNA, 358 bp, Artificial Sequence
  Description of Artificial Sequence: Synthetic polynucleotide
caggttcagctggtgcagtctggagctgaattgaagaagcctggggcctcagtgagggtctcctgcaaggcttctggttacacctttccaagttatgggatcacttgggtgcgacaggcccctggacaagggcttgagtggctgggatggatcagcacctacaacgataacacaatctatgcacagaacctccagggcagagtcaccatgaccacagacacatccacgagtacagccttcatggagctgaggagcctgatttctgacgacacggccgtctattactgtgcgatatgctgggggccctataattggaacgaaggttggggccagggaaccctagtcaccgtctcctcag

SEQ ID NO: 684 - DNA, 361 bp, Artificial Sequence
  Description of Artificial Sequence: Synthetic polynucleotide
caggtgcagctggtggagtctgggggaggcgtggtccagcctgggaggtccctgagactctcctgtgcagcctctggattcatcttcagcacctatgcgatgcactgggtccgccaggctccaggcaaggggctggagtgggtggcactaatatcatatgatggaaacaatcaatactacgcagactccacaaagggccgattcaccatctccagagacaattccaagaacacgctgtttctgcaaatgaacagcctgagacctgaggacacggctgtatattattgtgccagaggggggggagggacctactcctactttgacttctggggccagggcaccctggtcaccgtctcctcag

SEQ ID NO: 685 - DNA, 364 bp, Artificial Sequence
  Description of Artificial Sequence: Synthetic polynucleotide
caggtgcagctggtggagtctgggggaggcgtggtccagcctgggaggtccgtgagactctcctgtgcagcctccggattcaccttcagtatctatccgatgcactgggtccgccaggctccaggcaaggggctggagtgggtggcacttatatcatatgatggacacaatgcatactacgcagactccgtgaggggccgattcaccatctccagagacaattccaagaacacactttatcttcaaatgaacagcctgagagctgaggacacggcagtctatttctgtgcgagagcgtatagtgggagctacttcaatgcttttaatatctggggccaggggacaatggtcaccgtctcttcag

SEQ ID NO: 686 - DNA, 367 bp, Artificial Sequence
  Description of Artificial Sequence: Synthetic polynucleotide
gaggtccagctggtacagtctggggctgaggtgaagaagcctgggactacagtgaaagtctcctgcaaggtttctgggtacaccttcaccgactactacatgcactgggtgcaacaggcccctggaaaagggcttgaatgggtgggacttgttgatcctcaagatggtgaaacagaatacgcagagaagttccagggcagagtcaccataatcgcggacacgtctacagacacagcctacatggagctgagcagcctgagatctgaggacacggccttctattactgtgcaacagagacgatttttggagtgtccccccgggtagagggcaattggggccagggaaccctggtcatcgtctcctcag

SEQ ID NO: 687 - DNA, 367 bp, Artificial Sequence
  Description of Artificial Sequence: Synthetic polynucleotide
caggtgcagctggtggagtctgggggaggcgtggtccagcctgggaggtccctgagactctcctgcgcagcctctggattcatcttcagtagctatcctatgcactgggtccgccaggctccaggcaaggggctggagtggctgacagttatatcatatgatggaaacaataaatattacgcagactccgtgaagggtcgattcaccatctccagagacaattccaagaacacgttgtttttgcaaatcaccagcctgagagctgaggacacggctctttattactgtgcgagagaccgagccgcgaattacgggcggggcggctttgactactggggccagggaaccctggtcaccgtctcctcag

SEQ ID NO: 688 - DNA, 364 bp, Artificial Sequence
  Description of Artificial Sequence: Synthetic polynucleotide
caggtgcagctggtggagtctgggggaggcgtggtccaacctgggaggtccctgagactctcctgtgcagcgtctggattcaccttcagtacctatggcatgcactgggtccgccaggctccaggcaaggggctggagtgggtggcagttatatggtatgatggaagtaatgactactatgcagactccgtgaggggccgattcaccattttcagagacaattccatgaacactctatatctgcaaatgaacagcctgagagccgaggacacggctgtgtattattgtgcgagagagggaaaaggaatggttcggggagttcttgactactggggccagggaaccctggtcaccgtctcctcag

SEQ ID NO: 689 - DNA, 349 bp, Artificial Sequence
  Description of Artificial Sequence: Synthetic polynucleotide
caggtgcagctggtgcagtctggggctgaggtgaggaagactggggcctcagtgaaaatttcctgcaaggcatctggatacagtttcaccagctactatttacactgggtgcgacaggcccctggacaagggcttgtgtggatggggacaatcgaccctattggtggagccacaaactacgcacagaggttccagggcagagtctccatgaccagggacacgtccacgagcacggcctacatggaggtgagcagcctgagatttgaagacacggccgtatattattgtgcgcgaatggataggagtcaagtctactggggccagggagccctggtcaccgtctccgcag

SEQ ID NO: 690 - DNA, 364 bp, Artificial Sequence
  Description of Artificial Sequence: Synthetic polynucleotide
caggtgcagctggtgcagtctggggcccgcctgatctcttgtgtgcagaccacctccttgggggcacgggggcacaagcccaaatttttttgggggcaccggggccaaaatccaaaaaaccctcgattaaggcttgaatggatgggatggctgaaccctatcattgagatcactggctattcccataactttcagggcataatcaccatgaccacggacacctccataaacacagccttcatggaactgagcgccctgaaatctgaggacacggccatttattactgtgcaagaggcccgagtggatactactatgcttccggggacttctggggccagggaaccctagtcacagtctcctcag

SEQ ID NO: 691 - DNA, 379 bp, Artificial Sequence
  Description of Artificial Sequence: Synthetic polynucleotide
caggtgcagctggtgcagtctggggctgaggtgaagaagcctgggtcctcggtgaaggtctcctgcaaggcttctggaggcaccttccgcacctatgcaatcaactgggtgcgacaggcccctggacaagggcttgagtggatgggagggatcatccctctctttggcacaccaagctatccacgcagctaccagggcagagtcacgattaccgcggacgaatccacgagcacagccttcctgactctgaacagcctgagatctgacgacacggccgtgtattattgtgcgagagatgacgggaagatgaactttggttcggccccgtgggacttctttcactcctggggccagggaaccctggttaccgtctcctcag

SEQ ID NO: 692 - DNA, 388 bp, Artificial Sequence
  Description of Artificial Sequence: Synthetic polynucleotide
caggtgcagctgcaggagtcgggcccaggactggtgaagccttcggagaccctgtccctcatatgcaccgtctctggtggctccatcagtaataactactggaactggatccggcagtccccagggaagggactggagtggattgggtacatctattacagagggagcaccaactataacccctccctcaagagtcgagtctccatatcagtagacacgtccaagaaccagttctccctgaagctgacctctgtgaccgctgcggacacggccgtgtattactgtgcgagaggcctagtaatacgatattctgactcgttcccatccggaccgattatcgcggcttttgatatctggggccaagggacaatggtcaccgtctcttcag

SEQ ID NO: 693 - DNA, 367 bp, Artificial Sequence
  Description of Artificial Sequence: Synthetic polynucleotide
caggtgcagctggtgcagtctggggctgaggtgaagaagcctggggcctcagtgaacgttgcgtgtaaggcatctggatacaccttcaccacctactatgtgcactgggtgcggcaggcccctggacaagggcttgagtggttgggggtcatcaaccctagcgatggtagcacaaggtacgcaccgaagttggagggcagagtcaccatgaccagcgacacgcccacaaatacagtctacttggagttgagcagcctgaaatctggggacacggccgtatattactgtgcgagagtgtacatgggagctactgttatgcgcgcttttgatgtctggggccaagggacaatggtctccgtctcttcag

SEQ ID NO: 694 - DNA, 373 bp, Artificial Sequence
  Description of Artificial Sequence: Synthetic polynucleotide
caggtgcagctgcaggagtcgggcgcaggactggtgaagccttcggagaccctgtccctcatgtgcggtgtctatggtgggtccttcagtggtttctactggagctggatccgccagcccccagggaagggactgcagtggattggggaaatttatcatagtggaagcaccaactacaacccgtccctcaagagtcgagtcaccatgtcaatagacacgtccaagaagcagttctccctgaagctgagctctgtgaccgccgcggacacggctctgtattactgtgcgagaggccgtcgcgggatagtagtgggtatagacgaccccaactatgactactggggccagggaaccctggtcaccgtctcctcag

SEQ ID NO: 695 - DNA, 388 bp, Artificial Sequence
  Description of Artificial Sequence: Synthetic polynucleotide
caggtgcagctacagcagtggggcgcaggactgttgaagccttcggagaccctgtccctcacctgcgatgtctatggtgggtccttcaatggtttctactggagctggatccgtcagccccccgggaaggggctggagtggattggggaaatcaatcatagtggaagcgtcaactacatcccgtccctcaagagtcgagtcaccatatcaattgacacgtccaagaagcagttctccctgaaggtgacctctatgaccgccgcggacacgggtgtatattattgtgcgagaggtgtgaccaccccggtggtgcacttatacagctctggtcgtccctctcgatggttcgactcctggggccagggcacgctggtcaccgtctcctcag

SEQ ID NO: 696 - DNA, 367 bp, Artificial Sequence
  Description of Artificial Sequence: Synthetic polynucleotide
caggtccagctggtgcagtctggggctgaggtgaagaagcctgggtcctcggtaaaggtctcctgcaaggcctctggaggcatcttcaccagccacatcatcagttgggtgcgacaggcccctggacaagggcttgagtggatgggaaggatcatcccaagccttgatagagcaaactacgcacagaagttccaggacagagtcacgattaccgcggacaagtccacgagtacagcctacatggaactgagtagcctgagatctgaggacacggccatgtattactgtgcgagagaggagtttgtagtcgtaccagggaattggttcgacccctggggccagggaaccctggtcaccgtctcctcag

SEQ ID NO: 697 - DNA, 369 bp, Artificial Sequence
  Description of Artificial Sequence: Synthetic polynucleotide
gaggtgcagctggtggagtctgggggaggcctggtcaagccgggggggtccctgagactctcctgtgcagcctctggattcaccttcagcagcaatagcatgacctgggtccgccaggccccagggaaggggctggagtgggtctcttccattagtcctgatagtggttacatatattatgtagactcagtgaagggccgattcaccatctccagagacaacgccaagaactcactgtttctgcaaatgaacagcctgagagccgaggactcggctgtgtattactgtgcgagatgtgggggtggtggctgcaaccaagtgggcggcatggacgtctggggccaagggaccacggtcaccgtctcctca

SEQ ID NO: 698 - DNA, 376 bp, Artificial Sequence
  Description of Artificial Sequence: Synthetic polynucleotide
gaggtgcagctggtggagtctgggggaggcctggtcaagcctggggggtccctgagactctcctgtgcagcctctggattccccttcagtagttattccttgagttgggtccgccaggctccagggaaggggctggagtgggtctcatccattagtagtagtagtacttacaggtattacaccgactcagtgaagggccgattcaccatctccagagacaacgccaagaactcactggagctgcaaatgaacagcctgagagccgaggacacggctctatattactgtgcgagggccgaggcaggatattgtagaggtggtgcctgctacttctttgactactggggccagggaaccctggtcgccgtctcctcag

SEQ ID NO: 699 - DNA, 391 bp, Artificial Sequence
  Description of Artificial Sequence: Synthetic polynucleotide
caggtgcagctgcaggagtcgggcccaggactggtgaggccttcggggaccctgaccctcacctgcgctgtctctggtgactccatcagcagtggtcactggtgcacttgggtccgccagcccccagggaaggggctggagtggattgggaaaatctctcatagtgggagcatcaactacaacccgtccctcaagagccgaatcaccatgtcagtagacaagtccaagaaccagttctccctgaagctgagctctgtgaccgccgcggacacggccatgtattactgtgcgagagtgaggatcggcgcctcttattacgatttttggagtggttattatagcgatgcttttgatatctggggccaagggacaatggtcaccgtctcttcag

SEQ ID NO: 700 - DNA, 403 bp, Artificial Sequence
  Description of Artificial Sequence: Synthetic polynucleotide
caggtgcagctacagcagtggggcgcaggactgttgaagccttcggagaccctgtccctcacctgcgctgtctatggtgggtccttcagtggtttctactggtcctggatccgccagcccccagggaaggggctggagtggattggggaaatcactcatagtggaggcaccagctacagtggaggcaccaactacaacccgtccctcaagagtcgagtcaccatatcaatagacacgtccaagaagcagttctccctgaacttgacctctgtgaccgccgcggacacggctgtgtatttctgtgcgagaggcaccaccattggcttatataccaacacctggaactttccaagactggggttcgacccgtggggccagggaaccctggtcacggtctctgcgt

SEQ ID NO: 701 - DNA, 343 bp, Artificial Sequence
  Description of Artificial Sequence: Synthetic polynucleotide
gaggtgcagctggtggagtctggggggggcttggtccagccgggggggtccctgagactctcctgtgcagcctctggattcgtctctggtagattttggatgacgtggttccgccaggctccagggaaggggctggagtgggtggccaacattaagcaggattcaagtgagaagaactatgcggactttgcgaagggccgattcagcatctccagagacaaccccgggaactcactctttttacaaatgagcagtctcagagtcgaggacacggccgtctatttctgtgcgagagatgcgggggggctctggggccagggaaccctggtcaccgtctcctcag

SEQ ID NO: 702 - DNA, 236 bp, Artificial Sequence
  Description of Artificial Sequence: Synthetic polynucleotide
gaggtgcagctggtggagtctgggggtgaaacacctgtggtcttcctcctcctggtggcagctcccagatgtaagtgtctcaggaatgcggatctgattgggccgctgtgcccccagaggtggaattctcacaggagacgaggacacggttgtgtgatcctgtgtctcagatcagtcatttcaacaattcaaccgccccgcgcggggcccgggaattctgttcaccgtctcctcag

SEQ ID NO: 703 - DNA, 373 bp, Artificial Sequence
  Description of Artificial Sequence: Synthetic polynucleotide
caggtgcagctgcaggagtcgggcccaggactggtgaagccttcacagaccctgtccctcacctgcactgtctctggtggctccgtcatcagtgatgattactactggaattggatccgccagtccccagggaagggcctggagtggattgggtatatctctcacaatggggacaagtactacaacccgtccctcatgagtcgagtttccatatcggtggacacgtccaagaatcagttctccctgaagctgacctctgtgactgccgcagacacggccgtatattactgtgccagagatcagaggactgggagctacttcgggtattattttgactactggggccagggaaccctggtcatcgtctcctcag

SEQ ID NO: 704 - DNA, 379 bp, Artificial Sequence
  Description of Artificial Sequence: Synthetic polynucleotide
caggtccagctggtgcagtctggggctgaggtgaagaagcctgggtcctcggtgaaggtctcctgcaaggcttctggaggcaccttccgcacctatgcaatcaactgggtgcgacaggcccctggacaagggcttgagtggatgggagggatcatccctctctttggcacaccaagctatccacgcagctaccagggcagagtcacgattaccgcggacgaatccacgagcacagccttcctgactctgaacagcctgagatctgacgacacggccgtgtattattgtgcgagagatgacgggaagatgaactttggttcggccccgtgggacttctttcactcctggggccagggaaccctggttaccgtctcctcag

SEQ ID NO: 705 - DNA, 381 bp, Artificial Sequence
  Description of Artificial Sequence: Synthetic polynucleotide
caggtgcagctggtgcagtctggggctgaggtgaagaagcctgggtcctcggtgaaggtctcctgcaagacttctggaggcaccttcgtcaacttcaatagctatgctatcagttgggtgcggcaggcccctggacaagggcttgagtggatgggaaggatcatccccatccttggtgtgacaaattacgcacagaagttccagggcagagtgacgattaccgcggacaaagccacgcgcacagtctacatggagctgagcaacctgggatctgaggacacggccatgtactactgtgcgagagtgcaggatatcgtaatagttccagccgtctacggtatggacgtctggggccaggggaccacggtcaccgtctcctca

SEQ ID NO: 706 - DNA, 370 bp, Artificial Sequence
  Description of Artificial Sequence: Synthetic polynucleotide
caggtgcagctgcaggagtcgggcccaggactggtgaagccttcggagaccctgtccctcacttgcactgtctctgatggctccatcagtccctacttctggagctggatccggcagcccccaggggagggactggaatggattggttatatctattacgatgggaacaccaactacagtccctccctcaagagtcgagccaccatatcactagacacgtccaagaaccagttctccctaatactgacctctgtgaccgctgcggacacggccgtgtattactgtgcgagaattcctctgcgtcttcgttcgggggggagggttgcttttgatatctggggccaagggacaatggtcaccgtctcttcag

SEQ ID NO: 707 - DNA, 397 bp, Artificial Sequence
  Description of Artificial Sequence: Synthetic polynucleotide
caggtgcagctggtggagtctgggggaggcgtggtccagcctgggaggtccctgagactctcctgtgcagcctctggattcaccttcagtaaatttgctatgcactgggtccgccaggctccaggcaaggggctggagtgggtggcaattatatcctatgatggaaacaataaatactacgcagactccgtgaagggccgattcaccatctccagagacaattccaagaacacgctgtatctgcgaatgaacagcctgagagctgaggacacggctgtctattactgtgcggttatgcatggttcggggagttattataattttgtttttttcgggtggaagcatgaagatccttctgagatctggggccaagggacaatggtctccgtctcttcag

SEQ ID NO: 708 - DNA, 370 bp, Artificial Sequence
  Description of Artificial Sequence: Synthetic polynucleotide
gaggtgcagctggtggagtctggaggaggtttgatccaccctggggggtccctgagactctcctgtgcagcctctggagtcatcgtcagtgacaattacatggcctgggtccgccaggctccaggaaaggggctggagtgggtctcatttctttctagcggtggtgctacatactacgcggcctccgtggagggccgattcaccatctccggagacggatcccagaacacagtgtatcttcaaatggacagcctgaaagccgaggacacggccgtatattattgtgtgagagttggggggagtagtggctgggtgagtgactactactttgactcctggggccagggaaccctggtcaccgtctcctcag

SEQ ID NO: 709 - DNA, 331 bp, Artificial Sequence
  Description of Artificial Sequence: Synthetic polynucleotide
cagtctgccctgactcagcctgcctccgtgtctgggtctcctggacagtcgatcaccatctcctgcactggaaccagcagtgacattggtgattatgactatgtctcctggtaccaacaacacccaggcaaagcccccaaactcctgatttatgatgtcacttatcggccctcaggggtttctaatctcttctctggctccaagtctggcaacacggcctccctgaccatctctgggcttcaggctgaggacgaggctgtttattattgcagctcatatacaaccagcaacactctcgtgttcggcggagggaccaagctgaccgtcctag

SEQ ID NO: 710 - DNA, 322 bp, Artificial Sequence
  Description of Artificial Sequence: Synthetic polynucleotide
gacatccagatgacccagtctccatcctccctgtctgcatctgtaggagacagagtcaccatcacttgccaggcgagtcacgacattaataagtatttaagttggtatcaacataaaccagggaaagcccctaaaatcatgacgtccgatgcatcgaatttggaagcaggggtcccatcaaggttcagtggaggtggatctgggacagactttactctcaccatcaacggcctgcagcctgaagattttgcaacatattactgtcaacaatatgatcgtctcccgatcaccttcggccaagggacacgactggacattaaac

SEQ ID NO: 711 - DNA, 328 bp, Artificial Sequence
  Description of Artificial Sequence: Synthetic polynucleotide
gaaattgtgttgacacagtctccagacaccctgtctttgtctccaggggaaagagccaccctctcctgcagggccagtcagagtgtgggcacctacttagcctggttccaacagaaacctggccagcctcccaggctcctcatctatgatgcatccaacagggccactggcatcccagccaggttcggtggcagtgggtctgggacagacttcactctcaccatcagcagcctagagcctgaagattttgcagtttattactgtcagcagcgtagcaactggcctcgtacgtggacgttcggccaagggaccaaggtggaaatcaaac

SEQ ID NO: 712 - DNA, 322 bp, Artificial Sequence
  Description of Artificial Sequence: Synthetic polynucleotide
gacatccagatgacccagtctccttccaccctgtctgcatctgtaggagacagagtcaacatcacttgccgggtcagtcagagaattactagctggttggcctggtatcagcagaaaccagggaaagcccctaaggtcctgatctctaagacatctagtttagaaggtggggtcccatcaaggttcagcggcagtggatctgggacagaattcactctcaccatcagcagcctgcagcctgatgattttgcaacttattactgccaacagtatagtgagttttcgtacacttttggccaggggaccaagctggagatcaaac

SEQ ID NO: 713 - DNA, 322 bp, Artificial Sequence
  Description of Artificial Sequence: Synthetic polynucleotide
gacatccagatgacccagtctccagcctccctgtctgcatctgtaggagacagagtcaccatcacttgtcgggcaagtcagagtgttaatatctatttgaactggtatcagcagaaaccagggaaagcccctacactcctgatccatggtgcatccagcttgcagactggggtcccatcaaggttcagtggcagtggatctgggacagatttcactctcaccatcagcagtctgcaacctgaagactttgcaacttactactgtcaacagagttacagtccccctcggacgttcggccaagggaccaaggtagaaatcagac

SEQ ID NO: 714 - DNA, 325 bp, Artificial Sequence
  Description of Artificial Sequence: Synthetic polynucleotide
tcctatgtgctgactcagccaccctcagtgtcagtggccccaggaaagacggccaggattaattgtgagggaaacagcattggaagtaaaaatgtgcactggtaccagcagaagccaggccaggcccctgttttggtcatcttttatgataacgaccggccctcagggatccctgagcgattctctggctccaactcagggaatacggccaccctgaccatcagcagagtcgaagccggggatgaggccgacttttactgtcaggtgtgggacagtagtactgatcaatgtgtcttcggaactgggaccaaggtcaccgtcctcg

SEQ ID NO: 715 - DNA, 340 bp, Artificial Sequence
  Description of Artificial Sequence: Synthetic polynucleotide
gacatcgtgatgacccagtctccagactccctggctgtgtctctgggcgagagggccaccatcaactgcaggtccagccagagtgttttatacagctccaacaatgagaactacttagcttggtaccagcagaaaccaggacagcctcctaagttgctcatttactgggcatctacccgggaatccgggatccctgaccgattcagtggcagcgggtctgggacagatttcactctcaccatcagcaggctgcaggctgaagatgtggcagtttattactgtcagcaatattatagtcttcctcgaacgttcggccaagggaccaaggtggaaatcaaac

SEQ ID NO: 716 - DNA, 334 bp, Artificial Sequence
  Description of Artificial Sequence: Synthetic polynucleotide
gatattgtgatgactcagtctccactctccctgcccgtcacccctggagagccggcctccatctcctgcaggtctagtcagagcctcctgcatagtaatggatacaactatttggattggtacctgcagaagccagggcagtctccacagctcctgatctatttgggttctaagcgggcctccggggtccctgacaggttcagtggcagtggatcaggcacggattttacactgaaaatcagcagagtggaggctgaggatgttggggtttattactgcatgcagggtctacaagggtacacttttggccaggggaccaagctggagatcaaac

SEQ ID NO: 717 - DNA, 322 bp, Artificial Sequence
  Description of Artificial Sequence: Synthetic polynucleotide
gacatccagatgacccagtctccatcctccctgtctgcatctgtgggagacagagtcaccatcacttgtcgggcaagtcagagcattggtttttatttgaattggtatcagcagaaaccagggaaagcccctaagttcctgatctatgctgcatccactttgcacagtggggtcccatcaaggttcagtggcagtggatctgggacagatttcactctcaccatcagcagtctgcaacctgaggattttgcaacttactactgtcaacagagttacagtaccccattcaatttcggccctgggaccaaagtggatatcaaac

SEQ ID NO: 718 - DNA, 325 bp, Artificial Sequence
  Description of Artificial Sequence: Synthetic polynucleotide
tcctatgagctgacacagccaccctcggtgtcagtgtccccaggacaaacggccaggatcacctgcgctggagatgcattgccaaaaaaatatgcttattggtaccagcagaagtcaggccaggcccctgtgctggtcatctatgaggacagcaaacgaccctccgggatccctgagagattctctggctccagctcagggacaatggccaccttgactatcagtggggcccaggtggaggatgaagctgactactactgttactcaacagacagcagtggtaatcatagggtgttcggcggagggaccaagctgaccgtcctag

SEQ ID NO: 719 - DNA, 337 bp, Artificial Sequence
  Description of Artificial Sequence: Synthetic polynucleotide
gatattgtgatgacccagactccactctctctgtccgtcacccctggacagccggcctccatctcctgcaaatctagtcagagcctgtcgcatagtgatggaaagacctatttgtattggtacctgcagaggccaggccagtctccacggctcctaatctatgaagtttccagccggttctctggagtgcctgataggttcagtggcagcgggtcagggacagatttcacactgaaaatcggccgggtggaggctgaggatgttggggtctattactgcatgcagggtatacatcgtatattcactttcggccctgggaccaaagtggatatcaaac

SEQ ID NO: 720 - DNA, 334 bp, Artificial Sequence
  Description of Artificial Sequence: Synthetic polynucleotide
cagtctgccctgactcagcctcgctcagtgtccgggtctcctggacagtcagtcaccatctcctgcactggaaccagcagtgatgttggtggttataactatgtctcctggtaccaacagcacccaggcaaagcccccaaactaatgatttatgatgtcagtaagcggccctcaggggtccctgatcgcttctctggctccaagtctggcaacacggcctccctgaccatctctgggctccaggctgaggatgaggctgattattactgctgctcatatgcacgcacctacacttatgtgctattcggcggagggaccaagctgaccgtcctag

SEQ ID NO: 721 - DNA, 325 bp, Artificial Sequence
  Description of Artificial Sequence: Synthetic polynucleotide
gccatccagttgacccagtctccatcctccctgtctgcatctgtaggagacagagtcaccatcacttgccgggcaagtcagggcattagcagtgctttagcctggtatcagcagaaaccaggaaaagttcctaagctcctgatctatgatgcctccagtttggaaagtggggtcccatcaaggttcagcggcagtggatctgggacagatttcactctcaccatcaacagcctgcagcctgaagattttgcaacttattactgtcaacagtttaataattacccagcgctcactttcggcggagggaccaaggtggagatcaaac

SEQ ID NO: 722 - DNA, 322 bp, Artificial Sequence
  Description of Artificial Sequence: Synthetic polynucleotide
gacatccagatgacccagtctccatcctccctgtctgcatccgtaggagacacagtcaccatcacttgccaggcgagtcaagacattaataagtttttaaattggtatcagcagaagccagggaaagcccctaaactcctgatcttcgactcatctgatttggacacaggggtcccaacaaggttcagtggaagtggctctgggacagattttaaattcaccatcagtagcctgcagcctgaagattttgcgacatattactgtcagcagtatgaaaatctgcctgtcaccttcggcggagggaccaaggtggagaccaacc

SEQ ID NO: 723 - DNA, 322 bp, Artificial Sequence
  Description of Artificial Sequence: Synthetic polynucleotide
gacatccagatgacccagtctccatcccccctgtctgcatctgtcggcgacagagtcaccatcacttgccgggcaagtcagagtattagcacctatttagattggtatcagcagaaaccagggaaagcccctaaactcctgatctatgctgcatccactctgcaaaatggggtcccatcaaggttcagtggcagtggatctgggacagatttcactctcaccatcagtagtctgcaacctgaagattttgcaacttaccactgtcaacagagttacagtaccccgtacacttttggccaggggaccaagctggagatcaaac

SEQ ID NO: 724 - DNA, 343 bp, Artificial Sequence
  Description of Artificial Sequence: Synthetic polynucleotide
gacatcgtgatgacccagtctccagactccctggctgtgtctctgggcgagagggccacgatcaactgcaagtccagcgagagtgttttattcgccaccaataataagaaatacttagcttggtatcagcagaagccaggccagcctcctaagttgctcatttactgggcatctacccgggcatccggggtccctgaccgattcagtggcagcgggtctcggacagatttcactctcaccatcagcagcctgcaggctgaagatgtggcagtttattactgtcagcaatattatagtgctcctctgtacgcttttggccaggggaccaagctggaggtcaaac

SEQ ID NO: 725 - DNA, 340 bp, Artificial Sequence
  Description of Artificial Sequence: Synthetic polynucleotide
gatattgtgatgacccagactccactctctctgtccgtcacccctggacagccggcctccatctcctgcaagtctagtcagagcctcctgcatagtgatggaaagacctatttgtattggtacctgcagaagccaggccagtctccacagctcctaatctatgaagtttccagccggttctctggagtgccaaataggttcagtggcagcgggtcagtgacagatttcacactgaaaatcagccgggtggaggctgaggatgttggggtttattattgcatgcaaggtatacaccttccctcattcactttcggccctgggaccaaagtggatatcaaac

SEQ ID NO: 726 - DNA, 322 bp, Artificial Sequence
  Description of Artificial Sequence: Synthetic polynucleotide
gccatccagatgacccagtctccatcctccctgtctgcatctgtaggagacagagtcaccatcacttgccgggcaagtcagggcatcagtactgatttaggctggtatcagcagaaaccagggaaagcccctaagctcctgatctatgctgcatccagtttacaagatggggtcccatcaaggttcagcggcagtggttctggcacagatttcactctcaccatcagcagcctgcagcctgaagattttgcaacttattactgtctacagaattacaattacccttttaccttcggcggagggaccaaagtggagatcaaac

SEQ ID NO: 727 - DNA, 325 bp, Artificial Sequence
  Description of Artificial Sequence: Synthetic polynucleotide
tcttctgagctgactcaggaccctgctgtgtctgtggccttgggacagacagtcaccatcacatgccggggagacagcctcagaacctcttatgcaagctggtgccagcagaagccaggacaggcccctgttctcgccatttatggcaagaacaaccggccctcggggatcccagaccgcttctctggctcctattcaggaagtatagcttccttgaccaccactggggctcaggcggaagatgaggctgactattactgtaactcccgggacagcagtggagaccatgtcccattcggcggagggaccaggctgaccgtcctaa

SEQ ID NO: 728 - DNA, 331 bp, Artificial Sequence
  Description of Artificial Sequence: Synthetic polynucleotide
cagtctgtgttgacgcagccgccctcagtttccgcggccccaggacagagagtcaccatctcctgctctggaagcagctccaacattgggaataattatgtatcctggtaccagcaagtcccaggaacagcccccaaactcctcatttatgacaatgataagcgaccctcagggattcctgaccgattctctggctccaagtctggcacgtcagccaccctgggcatcaccggactccagactggggacgaggccgattattactgcggaacatgggatagcagcctgagtgctggggtgttcggcggagggacgaagctgaccgtcctag

SEQ ID NO: 729 - DNA, 334 bp, Artificial Sequence
  Description of Artificial Sequence: Synthetic polynucleotide
cagtctgccctgactcagcctgcctccgtgtctgggtctcctggacagtcgatcaccatctcctgcactggtgccggcaatgatgttgggagttataaccttgtctcgtggtaccaacaccacccaggcaaagcccccaaactcataatttatgagggcactaagcggccctcagtggtttctgatcgcttctctggctccaagtctgccaccacggcctccctgacaatctctgggctccaggctgaggacgaggcagattattactgctgcttatatggacgtactaggacattttatgtcttcggaactgggaccaaggtcaccgtcctaa

SEQ ID NO: 730 - DNA, 325 bp, Artificial Sequence
  Description of Artificial Sequence: Synthetic polynucleotide
gaaattgtgttgacgcagtctccaggcaccctgtctttgtctccaggggaaagagcctccctctcctgcagggccagtcagagtgttagcagcagttacttagcctggtaccagcagagacctggccaggctcccaggctcctcatctatgatgcatccagcagggccactggcatcccagacaggttcagtggcagtgggtctgggacagacttcactctcaccatcagcagactggagtctgaagattttgcagtgtattactgtcagcagtatggtaactcaccaagaacgttcggccaagggaccaaggtggaaatcaaac

SEQ ID NO: 731 - DNA, 325 bp, Artificial Sequence
  Description of Artificial Sequence: Synthetic polynucleotide
gaaattgtgttgacacagtctccagccaccctgtctttgtctccaggggaaagagccaccctctcctgcagggccagtcagagtgttgacaactacttagcctggtaccaacagaaacctggccaggctcccagactcctcatctttgatgcatccaacagggccactggcatcccagccaggttcagtggcagtggatctgggaccgacttcactctcaccatcagtagcctagagcctgaagattttgcagtttattactgtcagcagcgtagcaactggcctccgtggacgttcggccaagggaccaaggtggaaatcaaac

SEQ ID NO: 732 - DNA, 334 bp, Artificial Sequence
  Description of Artificial Sequence: Synthetic polynucleotide
cagtctgccctgactcagcctgcctccgtgtctgggtctcctggacagtcgatcaccatctcctgcactgtcagcggcagtgatcgtgggagtcagaaccttgtctcctggcaccagcagtacccaggcaaagcccccaaactcatgatttatgaggtcaacaagcggccctcaggggtttctgatcgcttctctggctccaagtctggaaacacggcctccctgacaatctctgggctccaggctgaggacgagggtgtttattactgctcctcatatggaggtcgtagcacttctgtggtattcggcggagggaccaggctgaccgtcctag

SEQ ID NO: 733 - DNA, 322 bp, Artificial Sequence
  Description of Artificial Sequence: Synthetic polynucleotide
gaaatagtgatgacgcagtctccagccaccctgtctgtgtctccaggggaaagagccaccctctcctgcagggccagtcagagtgtttccagcaacttagcctggtataggcggaaacctggccaggctcccaggctcctcatctatggtgcatccaccagggccactggtatcccagccagcttcagtggcagtgggtctgggacagagttcactctcaccatcagcagcctgcagtctgaagattttgcagtttattactgtcagcagtataatacctggccattcactttcggccctgggaccaaagtggatgtcaaac

SEQ ID NO: 734 - DNA, 325 bp, Artificial Sequence
  Description of Artificial Sequence: Synthetic polynucleotide
gaaattgtgttgacgcagtctccaggcaccctgtctttgtctccaggggaaagagccaccctctcctgcagggccagtcagagtgttagcagcaactacttagcctggttccagcagaaacctggccaggctcccaggctcctcatttatgctacatttagtaggtccattggcatcgcagacagattcagtggcagtgggtctgggacagacttcactctcaccatcagcagactggagcctgaagattttgcagtgtattactgtcagcagtatggtagttcaccgtggacgttcggccaagggaccaaggtggaaatcaaac

SEQ ID NO: 735 - DNA, 337 bp, Artificial Sequence
  Description of Artificial Sequence: Synthetic polynucleotide
cagtctgtcgtgacgcagccgccctcagtgtctggggccccagggcagagggtcaccatgtcctgcactgggagcagatccaacatcggggcaggttatgatgtacactggtaccagcagcttccaggaacagcccccaaactcctcatctatggtaacaacaatcggccctcaggggtccctgaccgattctctggctccaagtctggcacctcagcctccctggccatcactgggctccaggctgaggatgaggctgattattactgccagtcttatgacaacagcctgagtgccgctgtggtattcggcggagggactaagctgaccgtcctag

SEQ ID NO: 736 - DNA, 325 bp, Artificial Sequence
  Description of Artificial Sequence: Synthetic polynucleotide
cagtctgccctgactcagcctcgctcagtgtccgggtctcctggacagtcagtcaccatctcctgcactggaaccagcagtgatgttggcgattataactctgtctcctggtaccaacaacacccaggcaaagcccccaaactcgtgatttatgcagtcactaggcggccctcaggggtccctgatcgcttctctggctccaagtctggcaacacggcctccctgaccatctctgggctccaggctgaggatgaggctgattattactgctactcatatgcaggcagcaacaccttcggaactgggaccaaggtcaccgtcctag

SEQ ID NO: 737 - DNA, 343 bp, Artificial Sequence
  Description of Artificial Sequence: Synthetic polynucleotide
gacatcgtgatgacccagtctccagactccctggctgtgtctctgggcgagagggccaccatcaactgcaagtccagccagagtattttatacagctccgacaataagaactacttggcttggtaccagcagaaaccaggacagcctcctaagttgctcatttactgggcatcaacccgggagtccggcgtccctgaccgattcagtggcagcggatctgggacagacttcactctcaccatcaacagcctgcaggctgaagatgtggcagtttattactgccagcaatattctaggactcctccgtacactttcggccaggggaccaagctggagatcaatc

SEQ ID NO: 738 - DNA, 343 bp, Artificial Sequence
  Description of Artificial Sequence: Synthetic polynucleotide
cagcttgtgctgactcaatcgccctctgcctctgcctccctgggagcctcggtcaagctcacctgcattctgagcggtggacacagcggctacgccatcgccatcgcctggcatcagcagcggccagagaagggccctcgattcttgatgcaacttaacagtgatggcagccacaccaagggggacgggatccctcatcgcttctcaggctccagctctggggctgagcgctacctcaccatctccggcctccagtctgaggatgaggctgactattactgtcagacctggggcactggcattcgggggattttcggaggagggactaagctgaccgtcctag

SEQ ID NO: 739 - DNA, 310 bp, Artificial Sequence
  Description of Artificial Sequence: Synthetic polynucleotide
gaaattgtgttgacacagtctccagccaccctgtctttgtctccaggggaaagagccaccctctcctgcagggccagtcagagtgttaccgactccttagcctggtatcaacacaaacctggccaggctcccagactcctcatctatgatgtatccaacagggccactggcatcccagtcaggttcagtggcagtgggtctgggacagacttcactctcaccatcagcagcctagaggctgaagattttgcagtttattactgtcagcagcgagtcactttcggccctgggaccaaagtggatatcaaac

SEQ ID NO: 740 - DNA, 322 bp, Artificial Sequence
  Description of Artificial Sequence: Synthetic polynucleotide
gccatccagatgacccagtctccatcctccctgtctgcatctgtaggagacacagtcaccatcacttgccgggcaagtcagggcattagaaatgacttaggctggtatcagcagaagccagggaaagcccctgcgctcctgatctttgctgcatccagtttatacagtggagtcccatcaaggttcagcggcagtggatctggcacagatttcactctcaccatcagcagcctgcagcctgaagattttgcaacttattactgtctacaagattacaattaccctctcactttcggcggagggaccaaggtggagatcaaac

SEQ ID NO: 741 - DNA, 331 bp, Artificial Sequence
  Description of Artificial Sequence: Synthetic polynucleotide
cagtctgccctgactcagcctccctcagtgtccgggtctcctggacagtcagtcaccatctcctgcactggaaccagcagtgatgttggtggttataactatgtctcctggtaccaacaccacccaggcaaagcccccaaactcatgatttatgatgtcactaagcggccctcaggggtccctgatcgcttctctggctccaagtctggcaacacggcctccctgaccatctctgggctccaggctgaggatgaggctgattattactgctgctcatatgcaggcagcaacacttgggtgttcggcggagggaccaagctgaccgtcctag

SEQ ID NO: 742 - DNA, 322 bp, Artificial Sequence
  Description of Artificial Sequence: Synthetic polynucleotide
tcctatgagctgacacagccaccctcggtgtcagtgtccccaggacagacggccacgatcacctgctctggagatgcatggccaaagcaatatgcttattggcaccagcagaaggcaggccaggcccctgtgttggttatctatgaagacaataagaggccctcagggatccctgggcgattctctggctccacctcagggacaacagtcgcgttgaccatcagtggagtccagccagaagacgaggctgactattactgtcaatcagcagacagccgtggtactgtggtattcggcggagggaccaagctgaccgtcctgc

SEQ ID NO: 743 - DNA, 328 bp, Artificial Sequence
  Description of Artificial Sequence: Synthetic polynucleotide
gaaattgtgttgacgcagtctccaggcaccctgtctttgtctccagggcaaagagccaccctctcctgcagggccagtcagagtgttagcagcaactacttagcctggttccagcagaaacctggccaggctcccaggctcctcatctatggtgcatccagcagggccactggcatcccagccaggttcagtggcagtgggtctgggacagacttcactctcaccatcagcaggctggagcctgaagattttgcagtgtattactgtcagcagtatggtagctcaccagggatcaccttcggccaagggacacgactggagattaaac

SEQ ID NO: 744 - DNA, 328 bp, Artificial Sequence
  Description of Artificial Sequence: Synthetic polynucleotide
cagtctgccctgactcagcctgcctccgtgtctgggtctcctggacagtcgatcaccatctcctgcactgaaaccagtagtgacattggtggttataactatgcctcctggtaccaacaacacccaggcaaagcccccaaactcataatttatgacgtcagtgatcggccctcaggggtttctaatcgcttctctggctccaagtctgacaacacggcctccctgaccatctctgggctccaggctgaggacgaggctgactattactgcagctcatatatgagcagtaatgtgatattcggcggagggaccaagctgaccgtcctag

SEQ ID NO: 745 - DNA, 319 bp, Artificial Sequence
  Description of Artificial Sequence: Synthetic polynucleotide
gaaattgtgttgacacagtctccagccaccctatctttgtctccaggggaaagagccaccctctcctgcagggccagtcagagtgttagcagcttcttagcctggtaccaacaaaaacctggccaggctcccaggctcctcatttatgatgcattcaacagggccactggcatcccagccaggttcagtggcagtgggtctgggacagacttcactctcaccatcagcagcctagagcctgaagattttgcagtttattactgtcagcagcgtacctcaacgctcactttcggcggagggaccaaggtggagatcaaac

SEQ ID NO: 746 - DNA, 328 bp, Artificial Sequence
  Description of Artificial Sequence: Synthetic polynucleotide
gaaattgtgttgacgcagtctccaggcaccctgtctttgtctccaggggaaagagccaccctctcctgcagggccagtcagagtgttagcagcaactacttagcctggtatcagcagaaacctggccaggctcccaggctcgtcatctatggtgcatccagcagggccactggcatcccagacaggttcagtggcagtgggtctgggacagactttactctcaccatcagcagactggagcctgaagattttgcaatatattattgccagcaatatggtggctcaccgatgtacacttttggccaggggaccaagctggagatgaaac

SEQ ID NO: 747 - DNA, 331 bp, Artificial Sequence
  Description of Artificial Sequence: Synthetic polynucleotide
cagtctgtgttgacgcagccgccctcagtgtctgcggccccaggacagaaggtcaccatctcctgctctggaagcagttccaacattgggaatcattatgtatcctggtaccagcagctcccaggaacagcccccaaactcctcatttatgacaataataagcgaccctcagacatgcctgaccgattctctgcctccaagtctggcacgtcagccaccctgggcatcaccggactccagactggggacgaggccgattattactgcggaacatgggatagcagcctgagtgctgtggtcttcggcggagggaccaagctgaccgtcctag

SEQ ID NO: 748 - DNA, 331 bp, Artificial Sequence
  Description of Artificial Sequence: Synthetic polynucleotide
cagtctgccctgactcagcctgcctccgtgtctggatctcctggacagtcgagcaccattttatgctctggaaccagcagtgatgttgggagtggtgaccttgtctcttggtaccaacaacacccaggcgaagcccccaatctcataatttatgagggcactaaacggccctcagcggtttctgatcgtttctctggctccaagtctggcgacacggcctccctgacaatctctgggctccaggctgaggacgaggctgattattactgctgctcatatgcaggtagtggcacttggatgttcggcggagggaccaagctgaccgtcctag

SEQ ID NO: 749 - DNA, 328 bp, Artificial Sequence
  Description of Artificial Sequence: Synthetic polynucleotide
tcttctgagctgactcaggaccctgttgtgtctgtggccttgggacagacagtcaggatcacatgccaaggagacagcctcagaagttattttgcaagctggtaccaacagaagccaggacaggcccctgtacttgtcatttatggtaaaaacaatcggccctcagggatcccagaccgattctctgcctccaactcaggaaacacagcttccttgaccatcactggggctcaggcggaagatgaggctggctacttctgttgctcccgggacagcagtggtaaccatcatgtggtattcggcggagggaccaagctgaccgtcctag

SEQ ID NO: 750 - DNA, 322 bp, Artificial Sequence
  Description of Artificial Sequence: Synthetic polynucleotide
gacatccagatgacccagtctccttccaccctgtctgcatctgtaggagacggagtcaccatcacttgccgggccagtcagagtattagtaactggttggcctggtatcagcagaaaccagggaaagcccctaagctcctgatcaatgaggcatccagtttagaaagtggagtcccatcaaggttcagcggcagtggatctgggacagagttcactctcaccatcagcagcctgcagcctgatgattttgcaacttattactgccaacactataatggttatccgttcacttttggccaggggaccaggctggagatcaaac

SEQ ID NO: 751 - DNA, 340 bp, Artificial Sequence
  Description of Artificial Sequence: Synthetic polynucleotide
gacatcgtgatgacccagtctccagactccctggctgtgtctctgggcgagagggccaccatcaactgcaagtccagccagactgttttcagcacctccaacaataagaattacttagtttggtatcagcagaaactgggacagcctcccaagctgctcatttactgggcatctacccggggatccggggtccctgaccgattcagtggcagcgggtctgggacagatttcactctcaccatcagcagcctgcaggctgaagatgtggccgtttattactgtcagcaatattatagtagtccgctcactttcggcggagggaccaaggtggagatcaaac

SEQ ID NO: 752 - DNA, 328 bp, Artificial Sequence
  Description of Artificial Sequence: Synthetic polynucleotide
gaaattgtgttgacgcagtctccaggcaccctgtctttgtccccaggggaaagagccaccctctcctgcagggccagtcagagtgttggaaatgactacttagcctggtaccagcaaaaacctggccaggctcccaggctcctcatctatggtgcatccagcagggccactggcatcccagacaggttcagtggaagtgggtctgggacagacttcactctcaccatcagcagactggagcctgaagattttgcagtatattactgtcagcaatatggtacctcaccggtgtacacctttggccaggggaccaagctggagatcaaac

SEQ ID NO: 753 - DNA, 325 bp, Artificial Sequence
  Description of Artificial Sequence: Synthetic polynucleotide
gaaattgtgttgacgcagtctccaggcaccctgtctttgtctccaggggaaagagccaccctctcctgcagggccagtcagagtgttagcagcagctacttagcctggtaccagcagaaacctggccaggctcccaggctcctcatctatggtgcatccagcagggccactggcatcccagacaggttcagtggcagtgggtctgggacagacttcactctcaccatcagcagactggagcctgaagattttgcagtgtattactgtcagcagtatggtagctcacctaagacgttcggccaagggaccaaggtggaaatcaaac

SEQ ID NO: 754 - DNA, 328 bp, Artificial Sequence
  Description of Artificial Sequence: Synthetic polynucleotide
cagtctgccctgactcagcctgcctccgtgtctgggtctcctggacagtcgatcaccatctcctgcactggaaccagcagtgatgttggaggctataactttgtctcctggtacaaacaagatccaggcaaagcccccaaactcatgatttatgaggtcagtaagcggccctcagtggtttctgatcgcttctctggctccaagtctggcaacacggcctccctgacaatctctgggctccaggctgaggacgaggctgattattactgctgctcatatgcaggaagttacaccctcttcggaagtgggaccaaggtcaccgtcctag

SEQ ID NO: 755 - DNA, 319 bp, Artificial Sequence
  Description of Artificial Sequence: Synthetic polynucleotide
tcctatgagctgacacagccatcctcaatgtcagtgtctccgggagagacagccgaaatcacctgctcaggagacgtattggaaagaaaatatggtcggtggttccagcagaagccaggccaggcccctgtattggtgatttataaagacactgagcgaccctcaggaatctctgagcgattctccggttccagctcagggaccacagtcaccttgaccatcagcggggcccaggttgaggatgaggctgattattactgttatactgcggctgacaacaatgttctattcggcggggggaccaagctgaccgtcttag

SEQ ID NO: 756 - DNA, 328 bp, Artificial Sequence
  Description of Artificial Sequence: Synthetic polynucleotide
cagtctgccctgactcagcctcgctcagtgtccgggtctccaggacagtcagtcaccatttcctgcactggagccaccagtgatattggtgcttataactatgtctcgtggtatcagcgacacccaggcaaagcccccaaagtcataatttatgatgtcactaagcggccctctggggtccctgctcgcttctctggctccaagtccggcaacacggcctccctgaccatctctgggctccaggctgaggatgagggtgattattactgctgctcatatggaggcaattatggggtcttcggcggagggaccgagctgaccgtcctag

SEQ ID NO: 757 - DNA, 322 bp, Artificial Sequence
  Description of Artificial Sequence: Synthetic polynucleotide
gacatccagatgacccagtctccatcctccctgcctgcatctgtaggtgacagagtcaccgtcacttgccgggcaagtcagagcattagcaactatttaaattggtatcagcacaaaccagggaaagcccctaagttcctgatctatggtgcatccagtttgcaaagtggggtcccatcgaggttcagtggcagtggatctgggacaaatttcactcttaccatcaccggtctgcaacctgaagattttgcaacttactactgtcaacagagttacaccaccgtgtacacttttggccaggggaccaagctggagatgaaac

SEQ ID NO: 758 - DNA, 340 bp, Artificial Sequence
  Description of Artificial Sequence: Synthetic polynucleotide
gacatcgtgatgacccagtctccagactccctggctgtgtctctgggcgagagggccaccatcaactgcaagtccagccagaatcttttatacaattccaacaattacaactacctagcctggtaccagcagaaaccaggacagcctcctaagttgctcatttactgggcatctacccgggaatccggggtccctgaccgattcagtggcagcgggtctgggacagatttcactctcaccatcagcagtctgcaggctgaagatgtggcactttattactgtcagcaatattatcataatccattcactttcggccctgggaccaaagtggacatcaaac

SEQ ID NO: 759 - DNA, 319 bp, Artificial Sequence
  Description of Artificial Sequence: Synthetic polynucleotide
cagtctgccctgactcagcctgcctccgtgtctgggtctcctggacagtcgatcaccatctcctgcactggaagcaacagtgatgttgtctcctggtaccaacaccacccaggcaaagcccccaaattcatgatttatgagggcactaagcggccctcaggggtttctgatcggttctctggttccaagtctggcaacacggcctccctgacaatctctgggctccaggctgaggacgaggctgattattactgctgctcatatgtaggtagtagcgctcatgtggtgttcggcggagggaccaagctgaccgtcctag

SEQ ID NO: 760 - DNA, 244 bp, Artificial Sequence
  Description of Artificial Sequence: Synthetic polynucleotide
cagtctgccctgactcagcctgaccaacaacacccacgcgaagacccccaactcgttatttatgatgtcattaatacaggcccaccacgggttgctaatcacttctccggctccaagactggcaacaacgcctccctgaccatctctggcctccaggatgaggacgagaatgattattactgctcctcatatacaacaagcagcactcttgtgttagtaactggaaccacagacaccaccctac

SEQ ID NO: 761 - DNA, 322 bp, Artificial Sequence
  Description of Artificial Sequence: Synthetic polynucleotide
gaaatagtgatgacgcagtctccagccaccctgtctgtgtctccagggaaaagagccaccctctcctgcagggccagtcagagtgttagcgacaacttagcctggtaccagcagaaacctggccaggctcccagactcctcatctatgcttcatccaccagggccaccggtatcccagccaggatcagtggcagtgggtctgggacagagttcactctcaccatcagcagcctgcagtctgaagattttgcagtatattactgccagcagtataatagctggcctctcacttttggcggagggaccaaggtggagatcaaac

SEQ ID NO: 762 - DNA, 48 bp, Artificial Sequence
  Description of Artificial Sequence: Synthetic oligonucleotide
gcgagagcggattattactatgatagtagtggttatttctttgactac

SEQ ID NO: 763 - DNA, 33 bp, Artificial Sequence
  Description of Artificial Sequence: Synthetic oligonucleotide
gcgagagactacggtgactactactttgactac

SEQ ID NO: 764 - DNA, 48 bp, Artificial Sequence
  Description of Artificial Sequence: Synthetic oligonucleotide
gcgagatatatggtgacacgggaccagtactactacgatatggacgtc

SEQ ID NO: 765 - DNA, 42 bp, Artificial Sequence
  Description of Artificial Sequence: Synthetic oligonucleotide
gcgagagaagattactatgatagtagtggttcctttgaccac

SEQ ID NO: 766 - DNA, 54 bp, Artificial Sequence
  Description of Artificial Sequence: Synthetic oligonucleotide
gcgaccaaaccttattactatgatagtagtggttattacgggggctttgactac

SEQ ID NO: 767 - DNA, 54 bp, Artificial Sequence
  Description of Artificial Sequence: Synthetic oligonucleotide
gcgagggctcgaagggctgataatagtggttattacgggtttcactttgactgc

SEQ ID NO: 768 - DNA, 48 bp, Artificial Sequence
  Description of Artificial Sequence: Synthetic oligonucleotide
gcgagagcaaattattactatgaaagtagtggttattactttgactac

SEQ ID NO: 769 - DNA, 66 bp, Artificial Sequence
  Description of Artificial Sequence: Synthetic oligonucleotide
gcgaaagatatgcacaacgactacggtgactacgtgtcttactacttctactacggtatggacgtc

SEQ ID NO: 770 - DNA, 45 bp, Artificial Sequence
  Description of Artificial Sequence: Synthetic oligonucleotide
gcggaaaacctacaggatgattcagggaccctatattcggggggc

SEQ ID NO: 771 - DNA, 33 bp, Artificial Sequence
  Description of Artificial Sequence: Synthetic oligonucleotide
gcgagagacctacagcagctcgggattgactac

SEQ ID NO: 772 - DNA, 57 bp, Artificial Sequence
  Description of Artificial Sequence: Synthetic oligonucleotide
gcgagatggattcatcgggattttgactggttaccatatggcatgtttatggacgtc

SEQ ID NO: 773 - DNA, 48 bp, Artificial Sequence
  Description of Artificial Sequence: Synthetic oligonucleotide
gcgagagaaacatccttcgcgatttttggaggggggggtatggacgtc

SEQ ID NO: 774 - DNA, 69 bp, Artificial Sequence
  Description of Artificial Sequence: Synthetic oligonucleotide
gcgagagagagagtgggggtcggtatatatagcagatcgtccgagtcagactttccaactttcgacccc

SEQ ID NO: 775 - DNA, 36 bp, Artificial Sequence
  Description of Artificial Sequence: Synthetic oligonucleotide
gcgagagatctgggctctaggggggcttttgatatc

SEQ ID NO: 776 - DNA, 72 bp, Artificial Sequence
  Description of Artificial Sequence: Synthetic oligonucleotide
gccagagatgttcgggttgacgattcttggagtggttatgatctcctatccggggggacctactttgactat

SEQ ID NO: 777 - DNA, 60 bp, Artificial Sequence
  Description of Artificial Sequence: Synthetic oligonucleotide
gcgagagatcttgaggatttttggagtggttaccctcctcttggctacgctttggacgtc

SEQ ID NO: 778 - DNA, 42 bp, Artificial Sequence
  Description of Artificial Sequence: Synthetic oligonucleotide
gcgagagatccgtcctcccggggatactacggtatggacgtc

SEQ ID NO: 779 - DNA, 33 bp, Artificial Sequence
  Description of Artificial Sequence: Synthetic oligonucleotide
gcgagaggatttacgaattggtacttcgatctc

SEQ ID NO: 780 - DNA, 36 bp, Artificial Sequence
  Description of Artificial Sequence: Synthetic oligonucleotide
ggatcgggcagtgaggcccactacggtattgactac

SEQ ID NO: 781 - DNA, 63 bp, Artificial Sequence
  Description of Artificial Sequence: Synthetic oligonucleotide
gcaaaagatattctctccagggtgcattactatgatagtagtggttcttacggtatggacgtc

SEQ ID NO: 782 - DNA, 36 bp, Artificial Sequence
  Description of Artificial Sequence: Synthetic oligonucleotide
gcgagccaacagtggctacgagggaactttgactac

SEQ ID NO: 783 - DNA, 72 bp, Artificial Sequence
  Description of Artificial Sequence: Synthetic oligonucleotide
gcgaaagatttgttttacgatttttggagtggtttcgattttgggccgggcgaatcgtttggtatggacgtc

SEQ ID NO: 784 - DNA, 42 bp, Artificial Sequence
  Description of Artificial Sequence: Synthetic oligonucleotide
gcgagagaggattactatgatagtagtggttcccttgactac

SEQ ID NO: 785 - DNA, 42 bp, Artificial Sequence
  Description of Artificial Sequence: Synthetic oligonucleotide
gcgagagaggattactatgatagtagtggttcacttgactac

SEQ ID NO: 786 - DNA, 24 bp, Artificial Sequence
  Description of Artificial Sequence: Synthetic oligonucleotide
gcgagacataatgagcttgactac

SEQ ID NO: 787 - DNA, 27 bp, Artificial Sequence
  Description of Artificial Sequence: Synthetic oligonucleotide
gcgatggttcagggagttatggtctac

SEQ ID NO: 788 - DNA, 57 bp, Artificial Sequence
  Description of Artificial Sequence: Synthetic oligonucleotide
gcgaaagttctaacttggtcaatacaccccgaagactactactacggtatggacgtc

SEQ ID NO: 789 - DNA, 39 bp, Artificial Sequence
  Description of Artificial Sequence: Synthetic oligonucleotide
gcgaagctagcagtggctggtggacgtggtgcaaactac

SEQ ID NO: 790 - DNA, 78 bp, Artificial Sequence
  Description of Artificial Sequence: Synthetic oligonucleotide
gcgagagtccccacccaagtattacgatttttggagtggcataccaccgaagactactactactacggtatggacgtc

SEQ ID NO: 791 - DNA, 57 bp, Artificial Sequence
  Description of Artificial Sequence: Synthetic oligonucleotide
gcgaaaaaggggtccccgtattgtggtgttgactgctataaaggctactttgactat

SEQ ID NO: 792 - DNA, 45 bp, Artificial Sequence
  Description of Artificial Sequence: Synthetic oligonucleotide
gcgagagattactttctgataccagctgcaaatacaatggaagtc

SEQ ID NO: 793 - DNA, 24 bp, Artificial Sequence
  Description of Artificial Sequence: Synthetic oligonucleotide
gcgagacataatgagcttgaccac

SEQ ID NO: 794 - DNA, 57 bp, Artificial Sequence
  Description of Artificial Sequence: Synthetic oligonucleotide
gcgagggatgtcgcccactgtactactgtcggctgccatggaaactggttcgacacc

SEQ ID NO: 795 - DNA, 36 bp, Artificial Sequence
  Description of Artificial Sequence: Synthetic oligonucleotide
gcctgtatggtggggccgactgctccttttgacttc

SEQ ID NO: 796 - DNA, 48 bp, Artificial Sequence
  Description of Artificial Sequence: Synthetic oligonucleotide
gcgaaagctccatacagctatgcttattcggtttacttctttgactac

SEQ ID NO: 797 - DNA, 54 bp, Artificial Sequence
  Description of Artificial Sequence: Synthetic oligonucleotide
gcgagaggtctacgattttgtagtgacaccaggtgctacccgtactttgactac

SEQ ID NO: 798 - DNA, 48 bp, Artificial Sequence
  Description of Artificial Sequence: Synthetic oligonucleotide
gccagagggggttttaagagtggtttttatatccacggcatggacgtc

SEQ ID NO: 799 - DNA, 48 bp, Artificial Sequence
  Description of Artificial Sequence: Synthetic oligonucleotide
gcggggggttacgatttttggagtggttatcctaaccccactgactac

SEQ ID NO: 800 - DNA, 42 bp, Artificial Sequence
  Description of Artificial Sequence: Synthetic oligonucleotide
gtgaaagacaaagtgactacgatctttgatgtttttgatttg

SEQ ID NO: 801 - DNA, 66 bp, Artificial Sequence
  Description of Artificial Sequence: Synthetic oligonucleotide
gcaagatcccggtattacgatttttggagtggttattattccgtagatgactatggtatggacgtc

SEQ ID NO: 802 - DNA, 24 bp, Artificial Sequence
  Description of Artificial Sequence: Synthetic oligonucleotide
cagcagtatagtagctcacggacg

SEQ ID NO: 803 - DNA, 27 bp, Artificial Sequence
  Description of Artificial Sequence: Synthetic oligonucleotide
cagcagtatggtagctcacctcgaacg

SEQ ID NO: 804 - DNA, 27 bp, Artificial Sequence
  Description of Artificial Sequence: Synthetic oligonucleotide
caacagagttacagtccccctcccact

SEQ ID NO: 805 - DNA, 30 bp, Artificial Sequence
  Description of Artificial Sequence: Synthetic oligonucleotide
agctcatattctagcagcagcacttgggtg

SEQ ID NO: 806 - DNA, 27 bp, Artificial Sequence
  Description of Artificial Sequence: Synthetic oligonucleotide
cagcagtatggtagctcaccgtggacg

SEQ ID NO: 807 - DNA, 33 bp, Artificial Sequence
  Description of Artificial Sequence: Synthetic oligonucleotide
cagtcctatgacagcagcctgagtggttgggtg

SEQ ID NO: 808 - DNA, 24 bp, Artificial Sequence
  Description of Artificial Sequence: Synthetic oligonucleotide
ctgcagtatggtagctcacggacg

SEQ ID NO: 809 - DNA, 33 bp, Artificial Sequence
  Description of Artificial Sequence: Synthetic oligonucleotide
ggaacatgggatagcagcctgaggactgacgtc

SEQ ID NO: 810 - DNA, 33 bp, Artificial Sequence
  Description of Artificial Sequence: Synthetic oligonucleotide
ggaacatgggatagaagtctgagtgcttgggtc

SEQ ID NO: 811 - DNA, 24 bp, Artificial Sequence
  Description of Artificial Sequence: Synthetic oligonucleotide
caacagactaacagtttcccgtac

SEQ ID NO: 812 - DNA, 30 bp, Artificial Sequence
  Description of Artificial Sequence: Synthetic oligonucleotide
acctcatatgaaggcgacaacactttggtg

SEQ ID NO: 813 - DNA, 30 bp, Artificial Sequence
  Description of Artificial Sequence: Synthetic oligonucleotide
tgctcatatgcaggtagtagcacttatgtc

SEQ ID NO: 814 - DNA, 30 bp, Artificial Sequence
  Description of Artificial Sequence: Synthetic oligonucleotide
caacagagttacagtaccccccagtacagt

SEQ ID NO: 815 - DNA, 27 bp, Artificial Sequence
  Description of Artificial Sequence: Synthetic oligonucleotide
caacagcttaatagtgacccggtccct

SEQ ID NO: 816 - DNA, 27 bp, Artificial Sequence
  Description of Artificial Sequence: Synthetic oligonucleotide
cagcaatattatagtcttcctcgaacg

SEQ ID NO: 817 - DNA, 27 bp, Artificial Sequence
  Description of Artificial Sequence: Synthetic oligonucleotide
cagtcttatgatatcagcaatgtgata

SEQ ID NO: 818 - DNA, 30 bp, Artificial Sequence
  Description of Artificial Sequence: Synthetic oligonucleotide
cagcagcgtagcaactggccttcgctcact

SEQ ID NO: 819 - DNA, 30 bp, Artificial Sequence
  Description of Artificial Sequence: Synthetic oligonucleotide
caacagtataatagttattctccgctcact

SEQ ID NO: 820 - DNA, 36 bp, Artificial Sequence
  Description of Artificial Sequence: Synthetic oligonucleotide
gcagcatgggatgacagcctgagtggtcagaaagtt

SEQ ID NO: 821 - DNA, 33 bp, Artificial Sequence
  Description of Artificial Sequence: Synthetic oligonucleotide
caggcgtgggacagcagcactgcatcggtgata

SEQ ID NO: 822 - DNA, 30 bp, Artificial Sequence
  Description of Artificial Sequence: Synthetic oligonucleotide
cagtcttatgatagcagcacctattgggtg

SEQ ID NO: 823 - DNA, 27 bp, Artificial Sequence
  Description of Artificial Sequence: Synthetic oligonucleotide
caacagtatagtgagttttcgtacact

SEQ ID NO: 824 - DNA, 30 bp, Artificial Sequence
  Description of Artificial Sequence: Synthetic oligonucleotide
agctcatatacaagcagcagcacttgggtg

SEQ ID NO: 825 - DNA, 27 bp, Artificial Sequence
  Description of Artificial Sequence: Synthetic oligonucleotide
catcagagtagtagtttccctcgaacg

SEQ ID NO: 826 - DNA, 30 bp, Artificial Sequence
  Description of Artificial Sequence: Synthetic oligonucleotide
caacagtattatagtaccctcgggaggacg

SEQ ID NO: 827 - DNA, 30 bp, Artificial Sequence
  Description of Artificial Sequence: Synthetic oligonucleotide
agctcatatgcaggcagcaacattggcgtg

SEQ ID NO: 828 - DNA, 24 bp, Artificial Sequence
  Description of Artificial Sequence: Synthetic oligonucleotide
caacagtatcatagttggtggacg

SEQ ID NO: 829 - DNA, 30 bp, Artificial Sequence
  Description of Artificial Sequence: Synthetic oligonucleotide
agctcatatgcaggcagcaacaatttcgta

SEQ ID NO: 830 - DNA, 30 bp, Artificial Sequence
  Description of Artificial Sequence: Synthetic oligonucleotide
acctcatatgaagccgacaacactttggtc

SEQ ID NO: 831 - DNA, 27 bp, Artificial Sequence
  Description of Artificial Sequence: Synthetic oligonucleotide
caacaatatgatcgtctcccgatcacc

SEQ ID NO: 832 - DNA, 33 bp, Artificial Sequence
  Description of Artificial Sequence: Synthetic oligonucleotide
cagcagcgtagcaactggcctcgtacgtggacg

SEQ ID NO: 833 - DNA, 30 bp, Artificial Sequence
  Description of Artificial Sequence: Synthetic oligonucleotide
cagcagcgtaagagctggcctccgctcact

SEQ ID NO: 834 - DNA, 27 bp, Artificial Sequence
  Description of Artificial Sequence: Synthetic oligonucleotide
caacagacttacagtacccctcgaact

SEQ ID NO: 835 - DNA, 30 bp, Artificial Sequence
  Description of Artificial Sequence: Synthetic oligonucleotide
cagtcttatgatagcagtaatcatgtggta

SEQ ID NO: 836 - DNA, 27 bp, Artificial Sequence
  Description of Artificial Sequence: Synthetic oligonucleotide
caacagacttacagtgccccctggacg

SEQ ID NO: 837 - DNA, 30 bp, Artificial Sequence
  Description of Artificial Sequence: Synthetic oligonucleotide
agctcatatacaaccagcaacactctcgtg

SEQ ID NO: 838 - DNA, 33 bp, Artificial Sequence
  Description of Artificial Sequence: Synthetic oligonucleotide
gcagcatgggatgacagcctgagtggtcacgtg

SEQ ID NO: 839 - DNA, 27 bp, Artificial Sequence
  Description of Artificial Sequence: Synthetic oligonucleotide
caacagagttacagtccccctcggacg

SEQ ID NO: 840 - DNA, 33 bp, Artificial Sequence
  Description of Artificial Sequence: Synthetic oligonucleotide
cagtcttatgacagcagtatcagcggttgggtg

SEQ ID NO: 841 - DNA, 36 bp, Artificial Sequence
  Description of Artificial Sequence: Synthetic oligonucleotide
gtgagacaagggactataactggggacttcgaccac

SEQ ID NO: 842 - DNA, 75 bp, Artificial Sequence
  Description of Artificial Sequence: Synthetic oligonucleotide
gcacacttccccgtagtcccagttgttaccgcacttctctggttcgggcaattctcgccacgtgcgtttgactac

SEQ ID NO: 843 - DNA, 57 bp, Artificial Sequence
  Description of Artificial Sequence: Synthetic oligonucleotide
gcgaaagaaggaaataactacgatttttggagtggttattcttactactttgactac

SEQ ID NO: 844 - DNA, 36 bp, Artificial Sequence
  Description of Artificial Sequence: Synthetic oligonucleotide
gcgaaagactacggtgactacggagcctttgactac

SEQ ID NO: 845 - DNA, 51 bp, Artificial Sequence
  Description of Artificial Sequence: Synthetic oligonucleotide
gcgagagatcggaatcgaggctacaacaaattaggcgatgcttttgatatc

SEQ ID NO: 846 - DNA, 42 bp, Artificial Sequence
  Description of Artificial Sequence: Synthetic oligonucleotide
gcacggccccttaaccctggtttccccgatgtttttgatatt

SEQ ID NO: 847 - DNA, 45 bp, Artificial Sequence
  Description of Artificial Sequence: Synthetic oligonucleotide
gcgagatcttacctaagtggctacgaaggccactcctttgactac

SEQ ID NO: 848 - DNA, 57 bp, Artificial Sequence
  Description of Artificial Sequence: Synthetic oligonucleotide
gcgagggctacgtattactatgatagtagtgattatggaatcaactggttcgacccc

SEQ ID NO: 849 - DNA, 48 bp, Artificial Sequence
  Description of Artificial Sequence: Synthetic oligonucleotide
gcgagttattactatgatagtagtggttattactatggttttgatata

SEQ ID NO: 850 - DNA, 51 bp, Artificial Sequence
  Description of Artificial Sequence: Synthetic oligonucleotide
gcgagacagggggcacattgtagtggtggtgtctgctacggtatggacgtc

SEQ ID NO: 851 - DNA, 51 bp, Artificial Sequence
  Description of Artificial Sequence: Synthetic oligonucleotide
gcgagacagggggcacattgtagtggtggtgtttgctacggtatggacgtc

SEQ ID NO: 852 - DNA, 48 bp, Artificial Sequence
  Description of Artificial Sequence: Synthetic oligonucleotide
gcgagaggggacggcggcggttattggagtggttacggggaggtgaaa

SEQ ID NO: 853 - DNA, 51 bp, Artificial Sequence
  Description of Artificial Sequence: Synthetic oligonucleotide
gcgaaacaagggggggggccgtattactttggttcagggtactttgactac

SEQ ID NO: 854 - DNA, 54 bp, Artificial Sequence
  Description of Artificial Sequence: Synthetic oligonucleotide
gcgagatcatttaacgaggggcagctcggagacgcctaccacggcatggacgtc

SEQ ID NO: 855 - DNA, 48 bp, Artificial Sequence
  Description of Artificial Sequence: Synthetic oligonucleotide
gcaagagtgggatacacctatggtttccgctactggtacttcgatctc

SEQ ID NO: 856 - DNA, 45 bp, Artificial Sequence
  Description of Artificial Sequence: Synthetic oligonucleotide
accacgtcagactaccttcgatactactactacggtatcgacgtc

SEQ ID NO: 857 - DNA, 39 bp, Artificial Sequence
  Description of Artificial Sequence: Synthetic oligonucleotide
gcgagagaaccctcttatagcagtggctgccttgactac

SEQ ID NO: 858 - DNA, 54 bp, Artificial Sequence
  Description of Artificial Sequence: Synthetic oligonucleotide
gcgagggctcgaagggctggcagtagtggttattacgggtttcactttgactac

SEQ ID NO: 859 - DNA, 39 bp, Artificial Sequence
  Description of Artificial Sequence: Synthetic oligonucleotide
gcgaaatcggattcggagctgctacctcattttgactac

SEQ ID NO: 860 - DNA, 72 bp, Artificial Sequence
  Description of Artificial Sequence: Synthetic oligonucleotide
gcgaaactggaggggggccattactatggttcggggagttattacatttctacacccctcgctatggacgtc

SEQ ID NO: 861 - DNA, 24 bp, Artificial Sequence
  Description of Artificial Sequence: Synthetic oligonucleotide
gcgagagatcaacttcttgactat

SEQ ID NO: 862 - DNA, 33 bp, Artificial Sequence
  Description of Artificial Sequence: Synthetic oligonucleotide
gcgcgagccggcccggaggttccatttgaccac

SEQ ID NO: 863 - DNA, 21 bp, Artificial Sequence
  Description of Artificial Sequence: Synthetic oligonucleotide
gtcgtgtcggagggtgacttc

SEQ ID NO: 864 - DNA, 57 bp, Artificial Sequence
  Description of Artificial Sequence: Synthetic oligonucleotide
acgagagcaataagatattgtctcggaggttactgccaccacccctggttcgacccc

SEQ ID NO: 865 - DNA, 54 bp, Artificial Sequence
  Description of Artificial Sequence: Synthetic oligonucleotide
ggtcatatggcagcaactggtaggatttccttctactaccacggtttggacgtc

SEQ ID NO: 866 - DNA, 51 bp, Artificial Sequence
  Description of Artificial Sequence: Synthetic oligonucleotide
gcaaaaggggattgtagtagcaccagctgcgacgacccttactttgactac

SEQ ID NO: 867 - DNA, 48 bp, Artificial Sequence
  Description of Artificial Sequence: Synthetic oligonucleotide
gcgaaaggcccggacgattattggagtggttatggccggttcgacccc

SEQ ID NO: 868 - DNA, 42 bp, Artificial Sequence
  Description of Artificial Sequence: Synthetic oligonucleotide
gcgagaggcccgagtggatactactatggttccggggacttc

SEQ ID NO: 869 - DNA, 48 bp, Artificial Sequence
  Description of Artificial Sequence: Synthetic oligonucleotide
gccagagatcagaggactgggagctacttcgggtattattttgactac

SEQ ID NO: 870 - DNA, 36 bp, Artificial Sequence
  Description of Artificial Sequence: Synthetic oligonucleotide
gcgagagaaagatacaataccagaaactttgactat

SEQ ID NO: 871 - DNA, 39 bp, Artificial Sequence
  Description of Artificial Sequence: Synthetic oligonucleotide
gctgccatggttcggggaggtcaatacttctttgactat

SEQ ID NO: 872 - DNA, 63 bp, Artificial Sequence
  Description of Artificial Sequence: Synthetic oligonucleotide
gcgcgagattggccgaccaatgtaagatattgtagtagtgatatatgtccactctttgactac

SEQ ID NO: 873 - DNA, 51 bp, Artificial Sequence
  Description of Artificial Sequence: Synthetic oligonucleotide
gtgagagttggggggagtagtggctgggtgagtgactactactttgactcc

SEQ ID NO: 874 - DNA, 30 bp, Artificial Sequence
  Description of Artificial Sequence: Synthetic oligonucleotide
tgttcatatgcaggcaggaccacttgggtg

SEQ ID NO: 875 - DNA, 27 bp, Artificial Sequence
  Description of Artificial Sequence: Synthetic oligonucleotide
cagcagtatgggacctcaccattcact

SEQ ID NO: 876 - DNA, 30 bp, Artificial Sequence
  Description of Artificial Sequence: Synthetic oligonucleotide
cagcagtatggtagctcacccttccccgct

SEQ ID NO: 877 - DNA, 27 bp, Artificial Sequence
  Description of Artificial Sequence: Synthetic oligonucleotide
cagcaatattatagtactccgctcact

SEQ ID NO: 878 - DNA, 30 bp, Artificial Sequence
  Description of Artificial Sequence: Synthetic oligonucleotide
cagcagcgtagcaactggcctccgtggacg

SEQ ID NO: 879 - DNA, 33 bp, Artificial Sequence
  Description of Artificial Sequence: Synthetic oligonucleotide
caggtgtgggatagtagtggtgatcaagcggta

SEQ ID NO: 880 - DNA, 27 bp, Artificial Sequence
  Description of Artificial Sequence: Synthetic oligonucleotide
caacagtatgaaaatctcccgctcact

SEQ ID NO: 881 - DNA, 33 bp, Artificial Sequence
  Description of Artificial Sequence: Synthetic oligonucleotide
cagtcctatgacagcagcctgagtgtttatgtc

SEQ ID NO: 882 - DNA, 24 bp, Artificial Sequence
  Description of Artificial Sequence: Synthetic oligonucleotide
caacagcttaatagttacctcact

SEQ ID NO: 883 - DNA, 30 bp, Artificial Sequence
  Description of Artificial Sequence: Synthetic oligonucleotide
ctacaagattacgatttccctccgtacact

SEQ ID NO: 884 - DNA, 30 bp, Artificial Sequence
  Description of Artificial Sequence: Synthetic oligonucleotide
ctacaagattacgattttcctccctacact

SEQ ID NO: 885 - DNA, 30 bp, Artificial Sequence
  Description of Artificial Sequence: Synthetic oligonucleotide
cagtcttatgatagcaccaatctttgggtg

SEQ ID NO: 886 - DNA, 33 bp, Artificial Sequence
  Description of Artificial Sequence: Synthetic oligonucleotide
caacagtatgataatctcccccggcgggtcact

SEQ ID NO: 887 - DNA, 27 bp, Artificial Sequence
  Description of Artificial Sequence: Synthetic oligonucleotide
cagcagtatggtagctctcagtggacg

SEQ ID NO: 888 - DNA, 27 bp, Artificial Sequence
  Description of Artificial Sequence: Synthetic oligonucleotide
caacagcttaatagttaccctctaacg

SEQ ID NO: 889 - DNA, 30 bp, Artificial Sequence
  Description of Artificial Sequence: Synthetic oligonucleotide
caacagagttacagtatcccgggactcact

SEQ ID NO: 890 - DNA, 27 bp, Artificial Sequence
  Description of Artificial Sequence: Synthetic oligonucleotide
caacaatatgatagttattcttggacg

SEQ ID NO: 891 - DNA, 33 bp, Artificial Sequence
  Description of Artificial Sequence: Synthetic oligonucleotide
cagcagtataataactggcctcttacgtggacg

SEQ ID NO: 892 - DNA, 33 bp, Artificial Sequence
  Description of Artificial Sequence: Synthetic oligonucleotide
caggtgtgggatggtactagtgatcccgtggta

SEQ ID NO: 893 - DNA, 33 bp, Artificial Sequence
  Description of Artificial Sequence: Synthetic oligonucleotide
caggtgtgggacagtagtactgatcaatgtgtc

SEQ ID NO: 894 - DNA, 30 bp, Artificial Sequence
  Description of Artificial Sequence: Synthetic oligonucleotide
atgcaaggtatacaccttccctcattcact

SEQ ID NO: 895 - DNA, 30 bp, Artificial Sequence
  Description of Artificial Sequence: Synthetic oligonucleotide
cagcaatattatagtgctcctctgtacgct

SEQ ID NO: 896 - DNA, 30 bp, Artificial Sequence
  Description of Artificial Sequence: Synthetic oligonucleotide
agttcatatacaatcagcgacacaaagata

SEQ ID NO: 897 - DNA, 27 bp, Artificial Sequence
  Description of Artificial Sequence: Synthetic oligonucleotide
cagcagtatgaaaatctgcctgtcacc

SEQ ID NO: 898 - DNA, 27 bp, Artificial Sequence
  Description of Artificial Sequence: Synthetic oligonucleotide
atgcagggtatacatcgtatattcact

SEQ ID NO: 899 - DNA, 33 bp, Artificial Sequence
  Description of Artificial Sequence: Synthetic oligonucleotide
tactcaacagacagcagtggtaatcatagggtg

SEQ ID NO: 900 - DNA, 27 bp, Artificial Sequence
  Description of Artificial Sequence: Synthetic oligonucleotide
caacagagttacagtaccccgtacact

SEQ ID NO: 901 - DNA, 27 bp, Artificial Sequence
  Description of Artificial Sequence: Synthetic oligonucleotide
caacagagttacagtaccccattcaat

SEQ ID NO: 902 - DNA, 27 bp, Artificial Sequence
  Description of Artificial Sequence: Synthetic oligonucleotide
caacagagttacaccaccgtgtacact

SEQ ID NO: 903 - DNA, 24 bp, Artificial Sequence
  Description of Artificial Sequence: Synthetic oligonucleotide
atgcagggtctacaagggtacact

SEQ ID NO: 904 - DNA, 27 bp, Artificial Sequence
  Description of Artificial Sequence: Synthetic oligonucleotide
caacagtctgatgatctcccactcact

SEQ ID NO: 905 - DNA, 27 bp, Artificial Sequence
  Description of Artificial Sequence: Synthetic oligonucleotide
ctacagaattacaattacccttttacc

SEQ ID NO: 906 - DNA, 27 bp, Artificial Sequence
  Description of Artificial Sequence: Synthetic oligonucleotide
cagcagtataatagctggcctctcact

SEQ ID NO: 907 - DNA, 48 bp, Artificial Sequence
  Description of Artificial Sequence: Synthetic oligonucleotide
gcaacaacaaccccttttggagtggttaacgccatctggttcgacccc

SEQ ID NO: 908 - DNA, 45 bp, Artificial Sequence
  Description of Artificial Sequence: Synthetic oligonucleotide
gcaacaggcagtccctttggagtggttactgactggttcgacccc

SEQ ID NO: 909 - DNA, 48 bp, Artificial Sequence
  Description of Artificial Sequence: Synthetic oligonucleotide
gcgagagatcgagtcgatagcagcagctggggcttttactttgactac

SEQ ID NO: 910 - DNA, 33 bp, Artificial Sequence
  Description of Artificial Sequence: Synthetic oligonucleotide
tctgggttcggtggtgatgacggtatggacgtc

SEQ ID NO: 911 - DNA, 36 bp, Artificial Sequence
  Description of Artificial Sequence: Synthetic oligonucleotide
gcgagactagtccctgggcagtggcattttgactac

SEQ ID NO: 912 - DNA, 45 bp, Artificial Sequence
  Description of Artificial Sequence: Synthetic oligonucleotide
gcaacaggcagtccctttggagtggttactagctggttcgacccc

SEQ ID NO: 913 - DNA, 36 bp, Artificial Sequence
  Description of Artificial Sequence: Synthetic oligonucleotide
gcgagggacgtggatatagtgggcgtctttgactac

SEQ ID NO: 914 - DNA, 48 bp, Artificial Sequence
  Description of Artificial Sequence: Synthetic oligonucleotide
gcgagaatggctatagtgggagcttacgccaactggggctttgactac

SEQ ID NO: 915 - DNA, 54 bp, Artificial Sequence
  Description of Artificial Sequence: Synthetic oligonucleotide
gcgagaggcgagtataactggaacgacgaggactactactacggtatggacgtc

SEQ ID NO: 916 - DNA, 45 bp, Artificial Sequence
  Description of Artificial Sequence: Synthetic oligonucleotide
gcgagagcggatattgtagtagtaccagctgccgcctttgactac

SEQ ID NO: 917 - DNA, 33 bp, Artificial Sequence
  Description of Artificial Sequence: Synthetic oligonucleotide
ggaacatgggatagcagcctgagtgctggagtg

SEQ ID NO: 918 - DNA, 33 bp, Artificial Sequence
  Description of Artificial Sequence: Synthetic oligonucleotide
agctcatatgcaggcagtaacaacccttatgtc

SEQ ID NO: 919 - DNA, 36 bp, Artificial Sequence
  Description of Artificial Sequence: Synthetic oligonucleotide
tactcaacagacagcagtattaatcatagcggggta

SEQ ID NO: 920 - DNA, 30 bp, Artificial Sequence
  Description of Artificial Sequence: Synthetic oligonucleotide
cagcggcgtagcaactggcctccgtggacg

SEQ ID NO: 921 - DNA, 30 bp, Artificial Sequence
  Description of Artificial Sequence: Synthetic oligonucleotide
caacagtatgataatctcctcgcgctcact

SEQ ID NO: 922 - DNA, 33 bp, Artificial Sequence
  Description of Artificial Sequence: Synthetic oligonucleotide
agctcatatgcaggcagcaacaacccttatgtc

SEQ ID NO: 923 - DNA, 24 bp, Artificial Sequence
  Description of Artificial Sequence: Synthetic oligonucleotide
cagcagcgtagcaagtgggtcact

SEQ ID NO: 924 - DNA, 27 bp, Artificial Sequence
  Description of Artificial Sequence: Synthetic oligonucleotide
caacagtatgataatcccctgatcacc

SEQ ID NO: 925 - DNA, 30 bp, Artificial Sequence
  Description of Artificial Sequence: Synthetic oligonucleotide
cagacctggggcactggcatccatgtggta

SEQ ID NO: 926 - DNA, 36 bp, Artificial Sequence
  Description of Artificial Sequence: Synthetic oligonucleotide
aactcccgggacagtagtggtaaccagctgggtgta

SEQ ID NO: 927 - DNA, 72 bp, Artificial Sequence
  Description of Artificial Sequence: Synthetic oligonucleotide
gcgagagatctcggtttacgatattttgactggttattacgatcagactactactactacggtatggacgtc

SEQ ID NO: 928 - DNA, 60 bp, Artificial Sequence
  Description of Artificial Sequence: Synthetic oligonucleotide
gcgagaggcattgtttataatcacgtttggggaagttatcgttattccggctttgactac

SEQ ID NO: 929 - DNA, 60 bp, Artificial Sequence
  Description of Artificial Sequence: Synthetic oligonucleotide
gcgagagacatcacagtaactacgagggacgtatacgactactactacggaatggacgtc

SEQ ID NO: 930 - DNA, 48 bp, Artificial Sequence
  Description of Artificial Sequence: Synthetic oligonucleotide
gcgagagatctacatgagtgggagctactggccgcgggccttgactac

SEQ ID NO: 931 - DNA, 51 bp, Artificial Sequence
  Description of Artificial Sequence: Synthetic oligonucleotide
gcgagagcggctacaatcctcgggctttactactactacggtatggacgtc

SEQ ID NO: 932 - DNA, 66 bp, Artificial Sequence
  Description of Artificial Sequence: Synthetic oligonucleotide
gcgagggatgaatccacgtattactatgatagtagtggttattactacgagggttactttgactac

SEQ ID NO: 933 - DNA, 54 bp, Artificial Sequence
  Description of Artificial Sequence: Synthetic oligonucleotide
accacagatcggatttatgattacgtttgggggagttatcgttataaggactac

SEQ ID NO: 934 - DNA, 54 bp, Artificial Sequence
  Description of Artificial Sequence: Synthetic oligonucleotide
accacagatcgggattatgattacatttgggggagttatcgttatcgcgactac

SEQ ID NO: 935 - DNA, 57 bp, Artificial Sequence
  Description of Artificial Sequence: Synthetic oligonucleotide
gcacaccgaaacccttacggtggtgaagcgggctactactactacggtttggacgtc

SEQ ID NO: 936 - DNA, 48 bp, Artificial Sequence
  Description of Artificial Sequence: Synthetic oligonucleotide
gcgagagtggttattactggtttggactactactacggtatggacgtc

SEQ ID NO: 937 - DNA, 42 bp, Artificial Sequence
  Description of Artificial Sequence: Synthetic oligonucleotide
gcacggatacagctatggttagacgggggtggtatggacgtc

SEQ ID NO: 938 - DNA, 60 bp, Artificial Sequence
  Description of Artificial Sequence: Synthetic oligonucleotide
gcgagagtaagaaaccattactatgatagtagtggttattaccccgatgcttttgatatc

SEQ ID NO: 939 - DNA, 63 bp, Artificial Sequence
  Description of Artificial Sequence: Synthetic oligonucleotide
gcaacatcttcgggtcccagtcggctttgtggtggtggtagctgctaccattcatttgactac

SEQ ID NO: 940 - DNA, 39 bp, Artificial Sequence
  Description of Artificial Sequence: Synthetic oligonucleotide
gcgaaggctaaagacccgtacactgagtactttgactac

SEQ ID NO: 941 - DNA, 48 bp, Artificial Sequence
  Description of Artificial Sequence: Synthetic oligonucleotide
gcgagaggggacatagtgggagctacttgggatcccgcttttgacatc

SEQ ID NO: 942 - DNA, 45 bp, Artificial Sequence
  Description of Artificial Sequence: Synthetic oligonucleotide
gcacggataaatgcgtatagcagcagctggcccacatttgactac

SEQ ID NO: 943 - DNA, 45 bp, Artificial Sequence
  Description of Artificial Sequence: Synthetic oligonucleotide
gcgaggtcctcatcggggttttcctatgatactcccctcgacccc

SEQ ID NO: 944 - DNA, 69 bp, Artificial Sequence
  Description of Artificial Sequence: Synthetic oligonucleotide
gcgagagacctttcaaggacataccgattccagtattatgatagtggtgtgactgaagcttttgatatc

SEQ ID NO: 945 - DNA, 54 bp, Artificial Sequence
  Description of Artificial Sequence: Synthetic oligonucleotide
gcgagaggccgtcgcgggatagtagtgggtatagacgaccccaactatgactac

SEQ ID NO: 946 - DNA, 66 bp, Artificial Sequence
  Description of Artificial Sequence: Synthetic oligonucleotide
gcgagaggcaccaccattggcttatataccaacacctggaactttccaagactggggttcgacccg

SEQ ID NO: 947 - DNA, 63 bp, Artificial Sequence
  Description of Artificial Sequence: Synthetic oligonucleotide
gcgagagtcccgacggttacggtttatggagtggacgttataaatgtcagttggttcgacccc

SEQ ID NO: 948 - DNA, 45 bp, Artificial Sequence
  Description of Artificial Sequence: Synthetic oligonucleotide
gcgagagaggagtttgtagtcgtaccagggaattggttcgacccc

SEQ ID NO: 949 - DNA, 69 bp, Artificial Sequence
  Description of Artificial Sequence: Synthetic oligonucleotide
gcgagaggtgtgaccaccccggtggtgcacttatacagctctggtcgtccctctcgatggttcgactcc

SEQ ID NO: 950 - DNA, 27 bp, Artificial Sequence
  Description of Artificial Sequence: Synthetic oligonucleotide
gcgcgaatggataggagtcaagtctac

SEQ ID NO: 951 - DNA, 48 bp, Artificial Sequence
  Description of Artificial Sequence: Synthetic oligonucleotide
gcgaggggccatcgatttttggagttccccctaaactacctcgacccc

SEQ ID NO: 952 - DNA, 57 bp, Artificial Sequence
  Description of Artificial Sequence: Synthetic oligonucleotide
gcgagagatgacgggaagatgaactttggttcggccccgtgggacttctttcactcc

SEQ ID NO: 953 - DNA, 69 bp, Artificial Sequence
  Description of Artificial Sequence: Synthetic oligonucleotide
gcgagagtgaggatcggcgcctcttattacgatttttggagtggttattatagcgatgcttttgatatc

SEQ ID NO: 954 - DNA, 69 bp, Artificial Sequence
  Description of Artificial Sequence: Synthetic oligonucleotide
gcgagaggcctagtaatacgatattctgactcgttcccatccggaccgattatcgcggcttttgatatc

SEQ ID NO: 955 - DNA, 72 bp, Artificial Sequence
  Description of Artificial Sequence: Synthetic oligonucleotide
gcgaaagacgcggggtctgattccctttgggggaatcttcgttataccgacgtagggcggtactttgactac

SEQ ID NO: 956 - DNA, 63 bp, Artificial Sequence
  Description of Artificial Sequence: Synthetic oligonucleotide
gcgagagacttccatgttcgatttttgaattactacacgccagtgggaggtgcttttgatatc

SEQ ID NO: 957 - DNA, 57 bp, Artificial Sequence
  Description of Artificial Sequence: Synthetic oligonucleotide
gcgagggcccagccgaacgatttttggagtggttattatacggcggcttttgatatg

SEQ ID NO: 958 - DNA, 33 bp, Artificial Sequence
  Description of Artificial Sequence: Synthetic oligonucleotide
gcagcatgggatgacagcctgaatggttgggtg

SEQ ID NO: 959 - DNA, 30 bp, Artificial Sequence
  Description of Artificial Sequence: Synthetic oligonucleotide
tgctcatatgcaggcagccacacgtcggtc

SEQ ID NO: 960 - DNA, 33 bp, Artificial Sequence
  Description of Artificial Sequence: Synthetic oligonucleotide
caatcagcagacagcagtggtacttatgtggtg

SEQ ID NO: 961 - DNA, 33 bp, Artificial Sequence
  Description of Artificial Sequence: Synthetic oligonucleotide
caggcgtgggacagcagcactgcacgatatgtc

SEQ ID NO: 962 - DNA, 30 bp, Artificial Sequence
  Description of Artificial Sequence: Synthetic oligonucleotide
cagcagtatggtagctcacctacgtggacg

SEQ ID NO: 963 - DNA, 30 bp, Artificial Sequence
  Description of Artificial Sequence: Synthetic oligonucleotide
caacagtattatagtacccccatgtacact

SEQ ID NO: 964 - DNA, 21 bp, Artificial Sequence
  Description of Artificial Sequence: Synthetic oligonucleotide
caacagagttacagtcccctt

SEQ ID NO: 965 - DNA, 33 bp, Artificial Sequence
  Description of Artificial Sequence: Synthetic oligonucleotide
caatccgcagacagcagtaatacttatgtggtg

SEQ ID NO: 966 - DNA, 33 bp, Artificial Sequence
  Description of Artificial Sequence: Synthetic oligonucleotide
caggtgtgggatagtagtagtgatcattgggtg

SEQ ID NO: 967 - DNA, 24 bp, Artificial Sequence
  Description of Artificial Sequence: Synthetic oligonucleotide
agctcatatgcaggcagctatgtc

SEQ ID NO: 968 - DNA, 30 bp, Artificial Sequence
  Description of Artificial Sequence: Synthetic oligonucleotide
cagcagtattataactggcctccgtggagt

SEQ ID NO: 969 - DNA, 30 bp, Artificial Sequence
  Description of Artificial Sequence: Synthetic oligonucleotide
cagcagtatggtagctcaccgacgtggacg

SEQ ID NO: 970 - DNA, 27 bp, Artificial Sequence
  Description of Artificial Sequence: Synthetic oligonucleotide
caacagtattatatttactctctgtct

SEQ ID NO: 971 - DNA, 36 bp, Artificial Sequence
  Description of Artificial Sequence: Synthetic oligonucleotide
caggtgtgggacactagtagtgatcattctgtggta

SEQ ID NO: 972 - DNA, 27 bp, Artificial Sequence
  Description of Artificial Sequence: Synthetic oligonucleotide
cagcagtatggtagctcatcgtggacg

SEQ ID NO: 973 - DNA, 27 bp, Artificial Sequence
  Description of Artificial Sequence: Synthetic oligonucleotide
ctacagcataatagttaccccatcacc

SEQ ID NO: 974 - DNA, 33 bp, Artificial Sequence
  Description of Artificial Sequence: Synthetic oligonucleotide
ggaacatgggatagcagcctgagtgctggggtg

SEQ ID NO: 975 - DNA, 33 bp, Artificial Sequence
  Description of Artificial Sequence: Synthetic oligonucleotide
ggaacatgggatagcagcctgagtgctgtggtc

SEQ ID NO: 976 - DNA, 27 bp, Artificial Sequence
  Description of Artificial Sequence: Synthetic oligonucleotide
tgctcatatgcaggaagttacaccctc

SEQ ID NO: 977 - DNA, 33 bp, Artificial Sequence
  Description of Artificial Sequence: Synthetic oligonucleotide
tgcttatatggacgtactaggacattttatgtc

SEQ ID NO: 978 - DNA, 36 bp, Artificial Sequence
  Description of Artificial Sequence: Synthetic oligonucleotide
tgctcccgggacagcagtggtaaccatcatgtggta

SEQ ID NO: 979 - DNA, 30 bp, Artificial Sequence
  Description of Artificial Sequence: Synthetic oligonucleotide
tgctcatatgcaggtagtggcacttggatg

SEQ ID NO: 980 - DNA, 27 bp, Artificial Sequence
  Description of Artificial Sequence: Synthetic oligonucleotide
cagcaatattttactactcctaggacg

SEQ ID NO: 981 - DNA, 33 bp, Artificial Sequence
  Description of Artificial Sequence: Synthetic oligonucleotide
tcctcatatggaggtcgtagcacttctgtggta

SEQ ID NO: 982 - DNA, 30 bp, Artificial Sequence
  Description of Artificial Sequence: Synthetic oligonucleotide
cagcagtatggtagctcaccagggatcacc

SEQ ID NO: 983 - DNA, 30 bp, Artificial Sequence
  Description of Artificial Sequence: Synthetic oligonucleotide
cagcaatatggtacctcaccggtgtacacc

SEQ ID NO: 984 - DNA, 24 bp, Artificial Sequence
  Description of Artificial Sequence: Synthetic oligonucleotide
cagcagcgtacctcaacgctcact

SEQ ID NO: 985 - DNA, 27 bp, Artificial Sequence
  Description of Artificial Sequence: Synthetic oligonucleotide
cagcagtataatacctggccattcact

SEQ ID NO: 986 - DNA, 27 bp, Artificial Sequence
  Description of Artificial Sequence: Synthetic oligonucleotide
cagcagtatggtaactcaccaagaacg

SEQ ID NO: 987 - DNA, 45 bp, Artificial Sequence
  Description of Artificial Sequence: Synthetic oligonucleotide
gcgagagatccacgcacttcgggtgacaatgatggttttgatatg

SEQ ID NO: 988 - DNA, 42 bp, Artificial Sequence
  Description of Artificial Sequence: Synthetic oligonucleotide
gcgagaagttcctcggggagttatctctactactttgactac

SEQ ID NO: 989 - DNA, 57 bp, Artificial Sequence
  Description of Artificial Sequence: Synthetic oligonucleotide
gcgagaggtcctcaatgtactagtgccggttgctatgtcgtgggtgctatggacgtc

SEQ ID NO: 990 - DNA, 48 bp, Artificial Sequence
  Description of Artificial Sequence: Synthetic oligonucleotide
gcgagacattttccccgaacccagtggctgccatgggggttcgacccc

SEQ ID NO: 991 - DNA, 75 bp, Artificial Sequence
  Description of Artificial Sequence: Synthetic oligonucleotide
gcgaaagaaaacagagataggaattacggttcttggagtggttctaacagtgactactactacggtatggacgtc

SEQ ID NO: 992 - DNA, 51 bp, Artificial Sequence
  Description of Artificial Sequence: Synthetic oligonucleotide
gcgaaaggagggcctttcgctatcatgacttttggagcgcgatttgatctt

SEQ ID NO: 993 - DNA, 57 bp, Artificial Sequence
  Description of Artificial Sequence: Synthetic oligonucleotide
gcgagagagggaattacgagttttggaatcgttacacactattacgctctggacgtc

SEQ ID NO: 994 - DNA, 57 bp, Artificial Sequence
  Description of Artificial Sequence: Synthetic oligonucleotide
accacagtccattctgactacgtttgggggtcttatcgtaaggggtactttgactac

SEQ ID NO: 995 - DNA, 57 bp, Artificial Sequence
  Description of Artificial Sequence: Synthetic oligonucleotide
gcggcagagggaatttcggtttttggagtagttacacacttctacgctttggccgcc

SEQ ID NO: 996 - DNA, 57 bp, Artificial Sequence
  Description of Artificial Sequence: Synthetic oligonucleotide
gcgagaggtcctcagtgtactagtgtcggttgctacgtcgtgggggctttggacgtc

SEQ ID NO: 997 - DNA, 57 bp, Artificial Sequence
  Description of Artificial Sequence: Synthetic oligonucleotide
accacagtccattctgattacgtttggggatcttatcgtaaggggtactttgactat

SEQ ID NO: 998 - DNA, 39 bp, Artificial Sequence
  Description of Artificial Sequence: Synthetic oligonucleotide
gcgagaggaagggggagctacaacacgtactttgactac

SEQ ID NO: 999 - DNA, 42 bp, Artificial Sequence
  Description of Artificial Sequence: Synthetic oligonucleotide
gcgagagctaggggtgggagctacgctggtggctttgatatc

SEQ ID NO: 1000 - DNA, 45 bp, Artificial Sequence
  Description of Artificial Sequence: Synthetic oligonucleotide
gcgagactattttcggatagtgggaactacttctggttcgacccc

SEQ ID NO: 1001 - DNA, 54 bp, Artificial Sequence
  Description of Artificial Sequence: Synthetic oligonucleotide
gcgagagcccctggtcgtgacagttattactactactactacggtatggacgtc

SEQ ID NO: 1002 - DNA, 42 bp, Artificial Sequence
  Description of Artificial Sequence: Synthetic oligonucleotide
gcgaggacgtatagtgggagctactattcctactttgactac

SEQ ID NO: 1003 - DNA, 75 bp, Artificial Sequence
  Description of Artificial Sequence: Synthetic oligonucleotide
gcgaaagaaaacagagatagaaattacgattcttggagtgcctcttatagtgactactactacggtatggacgtc

SEQ ID NO: 1004 - DNA, 57 bp, Artificial Sequence
  Description of Artificial Sequence: Synthetic oligonucleotide
accacagtccattctgactacctttgggggtcttatcgtaagggctactttgactac

SEQ ID NO: 1005 - DNA, 51 bp, Artificial Sequence
  Description of Artificial Sequence: Synthetic oligonucleotide
gccaaaggagggcctttcgctattatgacttttggagcgcgattcgatctc

SEQ ID NO: 1006 - DNA, 75 bp, Artificial Sequence
  Description of Artificial Sequence: Synthetic oligonucleotide
gcgaaagaaaacagagataggaattacgattcttggagtggttcttatagtgactactactacggtatggacgtc

SEQ ID NO: 1007 - DNA, 51 bp, Artificial Sequence
  Description of Artificial Sequence: Synthetic oligonucleotide
gcgggcgaaggactacggtggtatcaactagcccactggtacttcgatctc

SEQ ID NO: 1008 - DNA, 42 bp, Artificial Sequence
  Description of Artificial Sequence: Synthetic oligonucleotide
gcgagaagtgggagtgggaactactaccactggttcgacccc

SEQ ID NO: 1009 - DNA, 45 bp, Artificial Sequence
  Description of Artificial Sequence: Synthetic oligonucleotide
gcgagagatccacgcagttcgggtgacaatgatggttttgatatg

SEQ ID NO: 1010 - DNA, 39 bp, Artificial Sequence
  Description of Artificial Sequence: Synthetic oligonucleotide
gcgaggggttttggagggaactactacgggatggacgtc

SEQ ID NO: 1011 - DNA, 66 bp, Artificial Sequence
  Description of Artificial Sequence: Synthetic oligonucleotide
gcgacagagagtttacattacgatattttgactggttattcccccaccaactacggtatggacgtc

SEQ ID NO: 1012 - DNA, 42 bp, Artificial Sequence
  Description of Artificial Sequence: Synthetic oligonucleotide
gcgaaaaccatttgggggacttatcgctccccctttgactac

SEQ ID NO: 1013 - DNA, 39 bp, Artificial Sequence
  Description of Artificial Sequence: Synthetic oligonucleotide
gtaagagagggtatagtggctacgatttattttgactac

SEQ ID NO: 1014 - DNA, 42 bp, Artificial Sequence
  Description of Artificial Sequence: Synthetic oligonucleotide
acgaccgatattccggccctgacagaaaacccctttgactac

SEQ ID NO: 1015 - DNA, 39 bp, Artificial Sequence
  Description of Artificial Sequence: Synthetic oligonucleotide
gcgagaggcggtgggaactacagggagccttttgactac

SEQ ID NO: 1016 - DNA, 42 bp, Artificial Sequence
  Description of Artificial Sequence: Synthetic oligonucleotide
gcgagatcattttgtagtagtggtgcctgctactttgactac

SEQ ID NO: 1017 - DNA, 42 bp, Artificial Sequence
  Description of Artificial Sequence: Synthetic oligonucleotide
gcgaaatcccggggggggaactactttgatgcttttgatatc

SEQ ID NO: 1018 - DNA, 42 bp, Artificial Sequence
  Description of Artificial Sequence: Synthetic oligonucleotide
gcgagggtttttggtgggagctacttaggtgcttttgatgtc

SEQ ID NO: 1019 - DNA, 42 bp, Artificial Sequence
  Description of Artificial Sequence: Synthetic oligonucleotide
gcgagaccacggctcgggaattacttcgatgcttttgatatc

SEQ ID NO: 1020 - DNA, 36 bp, Artificial Sequence
  Description of Artificial Sequence: Synthetic oligonucleotide
gcgagaaccgatggctacaaccaggcttttgatatc

SEQ ID NO: 1021 - DNA, 42 bp, Artificial Sequence
  Description of Artificial Sequence: Synthetic oligonucleotide
gcgagaggccgttcggactttttattacaaaactttgactac

SEQ ID NO: 1022 - DNA, 27 bp, Artificial Sequence
  Description of Artificial Sequence: Synthetic oligonucleotide
gcgacaggccggtatgatagtattcac

SEQ ID NO: 1023 - DNA, 36 bp, Artificial Sequence
  Description of Artificial Sequence: Synthetic oligonucleotide
gcgatatgctgggggccctataattggaacgaaggt

SEQ ID NO: 1024 - DNA, 45 bp, Artificial Sequence
  Description of Artificial Sequence: Synthetic oligonucleotide
gcgacctccctttatggcagcagctactacggaacttttaatatc

SEQ ID NO: 1025 - DNA, 45 bp, Artificial Sequence
  Description of Artificial Sequence: Synthetic oligonucleotide
gcgagagatggtccagttcttgactggttgtttgtgtttgactat

SEQ ID NO: 1026 - DNA, 42 bp, Artificial Sequence
  Description of Artificial Sequence: Synthetic oligonucleotide
gcgagagatagcagcagctggaggtacaattggttcgacccc

SEQ ID NO: 1027 - DNA, 27 bp, Artificial Sequence
  Description of Artificial Sequence: Synthetic oligonucleotide
gcgagagtagttcgctggttcgacccc

SEQ ID NO: 1028 - DNA, 42 bp, Artificial Sequence
  Description of Artificial Sequence: Synthetic oligonucleotide
gcgagagcgaatggtgggaactactactacggtatggacgtc

SEQ ID NO: 1029 - DNA, 45 bp, Artificial Sequence
  Description of Artificial Sequence: Synthetic oligonucleotide
gcgagagtcgagtcctatgataatagtggttattattttgactac

SEQ ID NO: 1030 - DNA, 42 bp, Artificial Sequence
  Description of Artificial Sequence: Synthetic oligonucleotide
gcgagagcgaggggtggtaactactactacggtatggacgtc

SEQ ID NO: 1031 - DNA, 42 bp, Artificial Sequence
  Description of Artificial Sequence: Synthetic oligonucleotide
gcgagcacattcggcggggcctactcctacggtatggacgtc

SEQ ID NO: 1032 - DNA, 42 bp, Artificial Sequence
  Description of Artificial Sequence: Synthetic oligonucleotide
gcgagagcaactagggggagctactattacggtatggacgtc

SEQ ID NO: 1033 - DNA, 42 bp, Artificial Sequence
  Description of Artificial Sequence: Synthetic oligonucleotide
gcgagaccagagagtgggagctacttgggtcactttgactcc

SEQ ID NO: 1034 - DNA, 42 bp, Artificial Sequence
  Description of Artificial Sequence: Synthetic oligonucleotide
gcgagagaccgtagtgggagctactttggcccgtttgactac

SEQ ID NO: 1035 - DNA, 42 bp, Artificial Sequence
  Description of Artificial Sequence: Synthetic oligonucleotide
gcgaggccccggggggggaactacgtgggaccctttgactac

SEQ ID NO: 1036 - DNA, 42 bp, Artificial Sequence
  Description of Artificial Sequence: Synthetic oligonucleotide
gcgaggacccatggtgggaactacgggaggtactttgactac

SEQ ID NO: 1037 - DNA, 42 bp, Artificial Sequence
  Description of Artificial Sequence: Synthetic oligonucleotide
gcgagagcccgagggggtggctacaaccggctttttgactac

SEQ ID NO: 1038 - DNA, 42 bp, Artificial Sequence
  Description of Artificial Sequence: Synthetic oligonucleotide
gcgagagcttatagtggaggatattactacggtatggacgtc

SEQ ID NO: 1039 - DNA, 51 bp, Artificial Sequence
  Description of Artificial Sequence: Synthetic oligonucleotide
gcgggcgaatccactgacaataattactactactactacgctatggacgtc

SEQ ID NO: 1040 - DNA, 39 bp, Artificial Sequence
  Description of Artificial Sequence: Synthetic oligonucleotide
gccagaggggggggagggacctactcctactttgacttc

SEQ ID NO: 1041 - DNA, 45 bp, Artificial Sequence
  Description of Artificial Sequence: Synthetic oligonucleotide
gcgagagaccgagccgcgaattacgggcggggcggctttgactac

SEQ ID NO: 1042 - DNA, 42 bp, Artificial Sequence
  Description of Artificial Sequence: Synthetic oligonucleotide
gcgagagcgtatagtgggagctacttcaatgcttttaatatc

SEQ ID NO: 1043 - DNA, 45 bp, Artificial Sequence
  Description of Artificial Sequence: Synthetic oligonucleotide
gcaacagagacgatttttggagtgtccccccgggtagagggcaat

SEQ ID NO: 1044 - DNA, 33 bp, Artificial Sequence
  Description of Artificial Sequence: Synthetic oligonucleotide
cagcagcgcagcaacaggcctccggcgtggacg

SEQ ID NO: 1045 - DNA, 27 bp, Artificial Sequence
  Description of Artificial Sequence: Synthetic oligonucleotide
cagcagtataataactggccgggcact

SEQ ID NO: 1046 - DNA, 30 bp, Artificial Sequence
  Description of Artificial Sequence: Synthetic oligonucleotide
caatcacaagacggcagtggtattgtggta

SEQ ID NO: 1047 - DNA, 27 bp, Artificial Sequence
  Description of Artificial Sequence: Synthetic oligonucleotide
cagcagtttggtagctcaccgtgggcg

SEQ ID NO: 1048 - DNA, 30 bp, Artificial Sequence
  Description of Artificial Sequence: Synthetic oligonucleotide
caacaacttaatagttaccccacgatcacc

SEQ ID NO: 1049 - DNA, 27 bp, Artificial Sequence
  Description of Artificial Sequence: Synthetic oligonucleotide
ctgctcttctatggtggtgtttggatg

SEQ ID NO: 1050 - DNA, 30 bp, Artificial Sequence
  Description of Artificial Sequence: Synthetic oligonucleotide
agctcatatacagccagcaacactctcgtc

SEQ ID NO: 1051 - DNA, 27 bp, Artificial Sequence
  Description of Artificial Sequence: Synthetic oligonucleotide
caacagggttacactaccccgtacact

SEQ ID NO: 1052 - DNA, 30 bp, Artificial Sequence
  Description of Artificial Sequence: Synthetic oligonucleotide
agctcatatacaagcagcggtggtctcgtc

SEQ ID NO: 1053 - DNA, 30 bp, Artificial Sequence
  Description of Artificial Sequence: Synthetic oligonucleotide
caatcacaaaacggcagtggtattggggta

SEQ ID NO: 1054 - DNA, 27 bp, Artificial Sequence
  Description of Artificial Sequence: Synthetic oligonucleotide
cagcagtatggtagctccccgtacact

SEQ ID NO: 1055 - DNA, 24 bp, Artificial Sequence
  Description of Artificial Sequence: Synthetic oligonucleotide
caacagtataatagttattggacg

SEQ ID NO: 1056 - DNA, 27 bp, Artificial Sequence
  Description of Artificial Sequence: Synthetic oligonucleotide
caacagagttccattacccctcggacg

SEQ ID NO: 1057 - DNA, 24 bp, Artificial Sequence
  Description of Artificial Sequence: Synthetic oligonucleotide
caacagtatgatgatctttggacg

SEQ ID NO: 1058 - DNA, 30 bp, Artificial Sequence
  Description of Artificial Sequence: Synthetic oligonucleotide
caacagctcagtacttaccccacgatcacc

SEQ ID NO: 1059 - DNA, 27 bp, Artificial Sequence
  Description of Artificial Sequence: Synthetic oligonucleotide
ctgctctattatgatggtgcttggatg

SEQ ID NO: 1060 - DNA, 30 bp, Artificial Sequence
  Description of Artificial Sequence: Synthetic oligonucleotide
caacagcttaatagttaccccacgatcacc

SEQ ID NO: 1061 - DNA, 30 bp, Artificial Sequence
  Description of Artificial Sequence: Synthetic oligonucleotide
agctcatatacaagcagcagcacttatgtc

SEQ ID NO: 1062 - DNA, 27 bp, Artificial Sequence
  Description of Artificial Sequence: Synthetic oligonucleotide
cagcagtatggtagctcacctcgcact

SEQ ID NO: 1063 - DNA, 33 bp, Artificial Sequence
  Description of Artificial Sequence: Synthetic oligonucleotide
cagcagcgtagcatcaggcctccggcgtggacg

SEQ ID NO: 1064 - DNA, 27 bp, Artificial Sequence
  Description of Artificial Sequence: Synthetic oligonucleotide
caacaggctaacagtttccctctcact

SEQ ID NO: 1065 - DNA, 30 bp, Artificial Sequence
  Description of Artificial Sequence: Synthetic oligonucleotide
agctcatatacaaggagcagcactctggta

SEQ ID NO: 1066 - DNA, 24 bp, Artificial Sequence
  Description of Artificial Sequence: Synthetic oligonucleotide
caacagtataatagttattacact

SEQ ID NO: 1067 - DNA, 33 bp, Artificial Sequence
  Description of Artificial Sequence: Synthetic oligonucleotide
caggcgtgggacagcagcactgcagggggggta

SEQ ID NO: 1068 - DNA, 36 bp, Artificial Sequence
  Description of Artificial Sequence: Synthetic oligonucleotide
caggtgtgggatagtagtagtgatcatcctgtggta

SEQ ID NO: 1069 - DNA, 27 bp, Artificial Sequence
  Description of Artificial Sequence: Synthetic oligonucleotide
caggcgtgggacagcagtaccttggta

SEQ ID NO: 1070 - DNA, 24 bp, Artificial Sequence
  Description of Artificial Sequence: Synthetic oligonucleotide
cagcaatattatagtactcggacg

SEQ ID NO: 1071 - DNA, 30 bp, Artificial Sequence
  Description of Artificial Sequence: Synthetic oligonucleotide
caacagcttaatagttaccctctcttcact

SEQ ID NO: 1072 - DNA, 27 bp, Artificial Sequence
  Description of Artificial Sequence: Synthetic oligonucleotide
caacactataatacttatgcgtggacg

SEQ ID NO: 1073 - DNA, 24 bp, Artificial Sequence
  Description of Artificial Sequence: Synthetic oligonucleotide
cagcagtatggtagcttgtacagt

SEQ ID NO: 1074 - DNA, 30 bp, Artificial Sequence
  Description of Artificial Sequence: Synthetic oligonucleotide
caacagtataagaattattcaccggtcact

SEQ ID NO: 1075 - DNA, 27 bp, Artificial Sequence
  Description of Artificial Sequence: Synthetic oligonucleotide
caacagtataatacttattcgtggacg

SEQ ID NO: 1076 - DNA, 36 bp, Artificial Sequence
  Description of Artificial Sequence: Synthetic oligonucleotide
cagtcttatgacaacagcctgagtgccgctgtggta

SEQ ID NO: 1077 - DNA, 27 bp, Artificial Sequence
  Description of Artificial Sequence: Synthetic oligonucleotide
cagcagtatggtagctcaccttggacg

SEQ ID NO: 1078 - DNA, 27 bp, Artificial Sequence
  Description of Artificial Sequence: Synthetic oligonucleotide
caacagtataatagttattcgatcacc

SEQ ID NO: 1079 - DNA, 27 bp, Artificial Sequence
  Description of Artificial Sequence: Synthetic oligonucleotide
caacagagtgacagtaccttgctcact

SEQ ID NO: 1080 - DNA, 33 bp, Artificial Sequence
  Description of Artificial Sequence: Synthetic oligonucleotide
cagcagtatggtagctcacctccgggattcgct

SEQ ID NO: 1081 - DNA, 33 bp, Artificial Sequence
  Description of Artificial Sequence: Synthetic oligonucleotide
cagcagcgtagtaactggcctccgaagctcact

SEQ ID NO: 1082 - DNA, 27 bp, Artificial Sequence
  Description of Artificial Sequence: Synthetic oligonucleotide
caacagagttacagtacccctaacact

SEQ ID NO: 1083 - DNA, 30 bp, Artificial Sequence
  Description of Artificial Sequence: Synthetic oligonucleotide
caacagcttaatagttaccccctattcact

SEQ ID NO: 1084 - DNA, 27 bp, Artificial Sequence
  Description of Artificial Sequence: Synthetic oligonucleotide
caacagagttacagtacggagttcact

SEQ ID NO: 1085 - DNA, 33 bp, Artificial Sequence
  Description of Artificial Sequence: Synthetic oligonucleotide
gcagcatgggatgacagcctgaatggtccggga

SEQ ID NO: 1086 - DNA, 27 bp, Artificial Sequence
  Description of Artificial Sequence: Synthetic oligonucleotide
cagcagtgtggtagctcacccaggacg

SEQ ID NO: 1087 - DNA, 27 bp, Artificial Sequence
  Description of Artificial Sequence: Synthetic oligonucleotide
cagttgtatggtagctcaccgtacact

SEQ ID NO: 1088 - DNA, 36 bp, Artificial Sequence
  Description of Artificial Sequence: Synthetic oligonucleotide
agctcatatacaaccagcagcacccccccttatgtc

SEQ ID NO: 1089 - DNA, 27 bp, Artificial Sequence
  Description of Artificial Sequence: Synthetic oligonucleotide
caacactataatagttattctcagacg

SEQ ID NO: 1090 - DNA, 24 bp, Artificial Sequence
  Description of Artificial Sequence: Synthetic oligonucleotide
caacagagttacagtctgcacagt

SEQ ID NO: 1091 - DNA, 30 bp, Artificial Sequence
  Description of Artificial Sequence: Synthetic oligonucleotide
agctcatttacaagcatcagcacttgggta

SEQ ID NO: 1092 - DNA, 27 bp, Artificial Sequence
  Description of Artificial Sequence: Synthetic oligonucleotide
cagcagtataataactggccacagacg

SEQ ID NO: 1093 - DNA, 36 bp, Artificial Sequence
  Description of Artificial Sequence: Synthetic oligonucleotide
gcaacatgggatgacagagtgagggggtattgggtg

SEQ ID NO: 1094 - DNA, 24 bp, Artificial Sequence
  Description of Artificial Sequence: Synthetic oligonucleotide
tactcatatgcaggcagcaacacc

SEQ ID NO: 1095 - DNA, 15 bp, Artificial Sequence
  Description of Artificial Sequence: Synthetic oligonucleotide
cagcagcgagtcact

SEQ ID NO: 1096 - DNA, 30 bp, Artificial Sequence
  Description of Artificial Sequence: Synthetic oligonucleotide
cagcaatattctaggactcctccgtacact

SEQ ID NO: 1097 - DNA, 30 bp, Artificial Sequence
  Description of Artificial Sequence: Synthetic oligonucleotide
cagacctggggcactggcattcgggggatt

SEQ ID NO: 1098 - DNA, 54 bp, Artificial Sequence
  Description of Artificial Sequence: Synthetic oligonucleotide
gcgagggccgaggcaggatattgtagaggtggtgcctgctacttctttgactac

SEQ ID NO: 1099 - DNA, 27 bp, Artificial Sequence
  Description of Artificial Sequence: Synthetic oligonucleotide
cagcaatattatagtagtccgctcact

SEQ ID NO: 1100 - protein, 474 aa, Artificial Sequence
  Description of Artificial Sequence: Synthetic polypeptide
MGWSCIILFLVATATGVHSEVQLVESGGGLVQPGGSLRLSCAASGVTFSSYWMSWVRQAPGKGLEWVANIRQDGSEKYSVDSVKGRFTISRDNAKNSLYLQMNSLRAEDTAVYYCARARRADNSGYYGFHFDCWGQGTLVTVSSASTKGPSVFPLAPSSKSTSGGTAALGCLVKDYFPEPVTVSWNSGALTSGVHTFPAVLQSSGLYSLSSVVTVPSSSLGTQTYICNVNHKPSNTKVDKKVEPKSCDKTHTCPPCPAPELLGGPSVFLFPPKPKDTLMISRTPEVTCVVVDVSHEDPEVKFNWYVDGVEVHNAKTKPREEQYNSTYRVVSVLTVLHQDWLNGKEYKCKVSNKALPAPIEKTISKAKGQPREPQVYTLPPSRDELTKNQVSLTCLVKGFYPSDIAVEWESNGQPENNYKTTPPVLDSDGSFFLYSKLTVDKSRWQQGNVFSCSVLHEALHSHYTQKSLSLSPGK

SEQ ID NO: 1101 - protein, 125 aa, Artificial Sequence
  Description of Artificial Sequence: Synthetic polypeptide
EVQLVESGGGLVQPGGSLRLSCAASGVTFSSYWMSWVRQAPGKGLEWVANIRQDGSEKYSVDSVKGRFTISRDNAKNSLYLQMNSLRAEDTAVYYCARARRADNSGYYGFHFDCWGQGTLVTVSS

SEQ ID NO: 1102 - protein, 236 aa, Artificial Sequence
  Description of Artificial Sequence: Synthetic polypeptide
MGWSCIILFLVATATGSWAQSVLTQPPSVSGAPGQRVTISCTGSSSNIGAGYDVHWYQQLPGTAPKLLIYGNNNRPSGVPDRFSDSKSGTSASLAITRLQAEDEADYYCQSYDSSLSGWVFGGGTKLTVLGQPKANPTVTLFPPSSEELQANKATLVCLISDFYPGAVTVAWKADSSPVKAGVETTTPSKQSNNKYAASSYLSLTPEQWKSHRSYSCQVTHEGSTVEKTVAPTECS

SEQ ID NO: 1103 - protein, 111 aa, Artificial Sequence
  Description of Artificial Sequence: Synthetic polypeptide
QSVLTQPPSVSGAPGQRVTISCTGSSSNIGAGYDVHWYQQLPGTAPKLLIYGNNNRPSGVPDRFSDSKSGTSASLAITRLQAEDEADYYCQSYDSSLSGWVFGGGTKLTVL

SEQ ID NO: 1104 - protein, 472 aa, Artificial Sequence
  Description of Artificial Sequence: Synthetic polypeptide
MGWSCIILFLVATATGVHSQVQLVQSGAEVKKPGSSVKVSCKASGGTFSSYAISWVRQAPGQGLEWMGRIIPMFGIANYAQKFQGRVTITADKSTSTAYLELSSLRSEDTAVYYCARYMVTRDQYYYDMDVWGQGTTVTVSSASTKGPSVFPLAPSSKSTSGGTAALGCLVKDYFPEPVTVSWNSGALTSGVHTFPAVLQSSGLYSLSSVVTVPSSSLGTQTYICNVNHKPSNTKVDKKVEPKSCDKTHTCPPCPAPELLGGPSVFLFPPKPKDTLMISRTPEVTCVVVDVSHEDPEVKFNWYVDGVEVHNAKTKPREEQYNSTYRVVSVLTVLHQDWLNGKEYKCKVSNKALPAPIEKTISKAKGQPREPQVYTLPPSRDELTKNQVSLTCLVKGFYPSDIAVEWESNGQPENNYKTTPPVLDSDGSFFLYSKLTVDKSRWQQGNVFSCSVLHEALHSHYTQKSLSLSPGK

SEQ ID NO: 1105 - protein, 123 aa, Artificial Sequence
  Description of Artificial Sequence: Synthetic polypeptide
QVQLVQSGAEVKKPGSSVKVSCKASGGTFSSYAISWVRQAPGQGLEWMGRIIPMFGIANYAQKFQGRVTITADKSTSTAYLELSSLRSEDTAVYYCARYMVTRDQYYYDMDVWGQGTTVTVSS

SEQ ID NO: 1106 - protein, 233 aa, Artificial Sequence
  Description of Artificial Sequence: Synthetic polypeptide
MGWSCIILFLVATATGVHSDIQMTQSPSSLSASVGDRVTITCRASQSISNYLNWYQQKPGKAPKLLIYAASSLQSGVPSRFSGSGSGTDFTLTISSLQPEDFATYYCQQSYSPPPTFGQGTKLEIKRTVAAPSVFIFPPSDEQLKSGTASVVCLLNNFYPREAKVQWKVDNALQSGNSQESVTEQDSKDSTYSLSSTLTLSKADYEKHKVYACEVTHQGLSSPVTKSFNRGEC

SEQ ID NO: 1107 - protein, 107 aa, Artificial Sequence
  Description of Artificial Sequence: Synthetic polypeptide
DIQMTQSPSSLSASVGDRVTITCRASQSISNYLNWYQQKPGKAPKLLIYAASSLQSGVPSRFSGSGSGTDFTLTISSLQPEDFATYYCQQSYSPPPTFGQGTKLEIK

SEQ ID NO: 1108 - protein, 472 aa, Artificial Sequence
  Description of Artificial Sequence: Synthetic polypeptide
MGWSCIILFLVATATGVHSQVQLVQSGAEVKKPGSSVKVSCKASGGTFSRYAINWVRQAPGQGLEWMGRIIPIFGIANYAQKFQGKVTITADKSTSTAYMELSSLRSEDTAVYYCARADYYYDSSGYFFDYWGQGTLVTVSSASTKGPSVFPLAPSSKSTSGGTAALGCLVKDYFPEPVTVSWNSGALTSGVHTFPAVLQSSGLYSLSSVVTVPSSSLGTQTYICNVNHKPSNTKVDKKVEPKSCDKTHTCPPCPAPELLGGPSVFLFPPKPKDTLMISRTPEVTCVVVDVSHEDPEVKFNWYVDGVEVHNAKTKPREEQYNSTYRVVSVLTVLHQDWLNGKEYKCKVSNKALPAPIEKTISKAKGQPREPQVYTLPPSRDELTKNQVSLTCLVKGFYPSDIAVEWESNGQPENNYKTTPPVLDSDGSFFLYSKLTVDKSRWQQGNVFSCSVLHEALHSHYTQKSLSLSPGK

SEQ ID NO: 1109 - protein, 123 aa, Artificial Sequence
  Description of Artificial Sequence: Synthetic polypeptide
QVQLVQSGAEVKKPGSSVKVSCKASGGTFSRYAINWVRQAPGQGLEWMGRIIPIFGIANYAQKFQGKVTITADKSTSTAYMELSSLRSEDTAVYYCARADYYYDSSGYFFDYWGQGTLVTVSS

SEQ ID NO: 1110 - protein, 233 aa, Artificial Sequence
  Description of Artificial Sequence: Synthetic polypeptide
MGWSCIILFLVATATGVHSEIVLTQSPGTLSLSPGERATLSCRASQSVSSSYLAWYQQKPGQTPRLLIYGASSRATGIPARFSGSGSGTNFTLTISRLEPEDFAVYYCQQYSSSRTFGQGTKVEIKRTVAAPSVFIFPPSDEQLKSGTASVVCLLNNFYPREAKVQWKVDNALQSGNSQESVTEQDSKDSTYSLSSTLTLSKADYEKHKVYACEVTHQGLSSPVTKSFNRGEC

SEQ ID NO: 1111 - protein, 107 aa, Artificial Sequence
  Description of Artificial Sequence: Synthetic polypeptide
EIVLTQSPGTLSLSPGERATLSCRASQSVSSSYLAWYQQKPGQTPRLLIYGASSRATGIPARFSGSGSGTNFTLTISRLEPEDFAVYYCQQYSSSRTFGQGTKVEIK

SEQ ID NO: 1112 - protein, 478 aa, Artificial Sequence
  Description of Artificial Sequence: Synthetic polypeptide
MGWSCIILFLVATATGVHSQVQLVESGGGVVQPGRSLRLSCAASGFTFSSYGMHWVRQAPGKGLEWVAVISFDGSNKYYVDSVKGRFTISRDNSKNTLYLQMNSLRAEDTAVYYCAKDMHNDYGDYVSYYFYYGMDVWGQGTTVTVSSASTKGPSVFPLAPSSKSTSGGTAALGCLVKDYFPEPVTVSWNSGALTSGVHTFPAVLQSSGLYSLSSVVTVPSSSLGTQTYICNVNHKPSNTKVDKKVEPKSCDKTHTCPPCPAPELLGGPSVFLFPPKPKDTLMISRTPEVTCVVVDVSHEDPEVKFNWYVDGVEVHNAKTKPREEQYNSTYRVVSVLTVLHQDWLNGKEYKCKVSNKALPAPIEKTISKAKGQPREPQVYTLPPSRDELTKNQVSLTCLVKGFYPSDIAVEWESNGQPENNYKTTPPVLDSDGSFFLYSKLTVDKSRWQQGNVFSCSVLHEALHSHYTQKSLSLSPGK

SEQ ID NO: 1113 - protein, 129 aa, Artificial Sequence
  Description of Artificial Sequence: Synthetic polypeptide
QVQLVESGGGVVQPGRSLRLSCAASGFTFSSYGMHWVRQAPGKGLEWVAVISFDGSNKYYVDSVKGRFTISRDNSKNTLYLQMNSLRAEDTAVYYCAKDMHNDYGDYVSYYFYYGMDVWGQGTTVTVSS

SEQ ID NO: 1114 - protein, 235 aa, Artificial Sequence
  Description of Artificial Sequence: Synthetic polypeptide
MGWSCIILFLVATATGSWAQSVLTQPPSVSAAPGQKVIISCSGSSSNIGNNYVSWYQQLPGTAPKLLIYENNKRPSGIPDRFSGSKSGTSATLGITGLQTGDEADYYCGTWDSSLRTDVFGGGTKLIVLGQPKANPTVTLFPPSSEELQANKATLVCLISDFYPGAVTVAWKADSSPVKAGVETTTPSKQSNNKYAASSYLSLTPEQWKSHRSYSCQVTHEGSTVEKTVAPTECS

SEQ ID NO: 1115 - protein, 110 aa, Artificial Sequence
  Description of Artificial Sequence: Synthetic polypeptide
QSVLTQPPSVSAAPGQKVIISCSGSSSNIGNNYVSWYQQLPGTAPKLLIYENNKRPSGIPDRFSGSKSGTSATLGITGLQTGDEADYYCGTWDSSLRTDVFGGGTKLIVL

SEQ ID NO: 1116 - protein, 469 aa, Artificial Sequence
  Description of Artificial Sequence: Synthetic polypeptide
MGWSCIILFLVATATGVHSQLQLQESGPGLVKPSETLSLTCTVSGGSISSSGYYWGWIRQPPGKGLEWIGTIYYGGSTYYSPSLKSRVTISVDTSKNQFSLKLSSVTAADTAVYYCASQQWLRGNFDYWGQGTLVTVSSASTKGPSVFPLAPSSKSTSGGTAALGCLVKDYFPEPVTVSWNSGALTSGVHTFPAVLQSSGLYSLSSVVTVPSSSLGTQTYICNVNHKPSNTKVDKKVEPKSCDKTHTCPPCPAPELLGGPSVFLFPPKPKDTLMISRTPEVTCVVVDVSHEDPEVKFNWYVDGVEVHNAKTKPREEQYNSTYRVVSVLTVLHQDWLNGKEYKCKVSNKALPAPIEKTISKAKGQPREPQVYTLPPSRDELTKNQVSLTCLVKGFYPSDIAVEWESNGQPENNYKTTPPVLDSDGSFFLYSKLTVDKSRWQQGNVFSCSVLHEALHSHYTQKSLSLSPGK

SEQ ID NO: 1117 - protein, 120 aa, Artificial Sequence
  Description of Artificial Sequence: Synthetic polypeptide
QLQLQESGPGLVKPSETLSLTCTVSGGSISSSGYYWGWIRQPPGKGLEWIGTIYYGGSTYYSPSLKSRVTISVDTSKNQFSLKLSSVTAADTAVYYCASQQWLRGNFDYWGQGTLVTVSS

SEQ ID NO: 1118 - protein, 236 aa, Artificial Sequence
  Description of Artificial Sequence: Synthetic polypeptide
MGWSCIILFLVATATGSWANFMLTQPHSVSESPGKTVTISCTGSSGSIASNYVQWYQQRPGSAPTTVIYEDNQRPSGVPDRFSGSIDSSSNSASLTISGLKTEDEADYYCQSYDSSTYWVFGGGTKLTVLGQPKANPTVTLFPPSSEELQANKATLVCLISDFYPGAVTVAWKADSSPVKAGVETTTPSKQSNNKYAASSYLSLTPEQWKSHRSYSCQVTHEGSTVEKTVAPTECS

SEQ ID NO: 1119 - protein, 111 aa, Artificial Sequence
  Description of Artificial Sequence: Synthetic polypeptide
NFMLTQPHSVSESPGKTVTISCTGSSGSIASNYVQWYQQRPGSAPTTVIYEDNQRPSGVPDRFSGSIDSSSNSASLTISGLKTEDEADYYCQSYDSSTYWVFGGGTKLTVL

SEQ ID NO: 1120 - protein, 480 aa, Artificial Sequence
  Description of Artificial Sequence: Synthetic polypeptide
MGWSCIILFLVATATGVHSEVQLVESGGGMVQPGGSLRLSCAASGFTFNNYAMNWVRQAPGKGLEWVSAISGSGIRTYYAESVKGRVTISRDNSKSTLYLQMNSLRAEDTAVYYCAKDLFYDFWSGFDFGPGESFGMDVWGQGTTVTVSSASTKGPSVFPLAPSSKSTSGGTAALGCLVKDYFPEPVTVSWNSGALTSGVHTFPAVLQSSGLYSLSSVVTVPSSSLGTQTYICNVNHKPSNTKVDKKVEPKSCDKTHTCPPCPAPELLGGPSVFLFPPKPKDTLMISRTPEVTCVVVDVSHEDPEVKFNWYVDGVEVHNAKTKPREEQYNSTYRVVSVLTVLHQDWLNGKEYKCKVSNKALPAPIEKTISKAKGQPREPQVYTLPPSRDELTKNQVSLTCLVKGFYPSDIAVEWESNGQPENNYKTTPPVLDSDGSFFLYSKLTVDKSRWQQGNVFSCSVLHEALHSHYTQKSLSLSPGK

SEQ ID NO: 1121 - protein, 131 aa, Artificial Sequence
  Description of Artificial Sequence: Synthetic polypeptide
EVQLVESGGGMVQPGGSLRLSCAASGFTFNNYAMNWVRQAPGKGLEWVSAISGSGIRTYYAESVKGRVTISRDNSKSTLYLQMNSLRAEDTAVYYCAKDLFYDFWSGFDFGPGESFGMDVWGQGTTVTVSS

SEQ ID NO: 1122 - protein, 233 aa, Artificial Sequence
  Description of Artificial Sequence: Synthetic polypeptide
MGWSCIILFLVATATGVHSDIQLTQSPSTLSASVGDRVNITCRVSQRITSWLAWYQQKPGKAPKVLISKTSSLEGGVPSRFSGSGSGTEFTLTISSLQPDDFATYYCQQYSEFSYTFGQGTKLEIKRTVAAPSVFIFPPSDEQLKSGTASVVCLLNNFYPREAKVQWKVDNALQSGNSQESVTEQDSKDSTYSLSSTLTLSKADYEKHKVYACEVTHQGLSSPVTKSFNRGEC

SEQ ID NO: 1123 - protein, 107 aa, Artificial Sequence
  Description of Artificial Sequence: Synthetic polypeptide
DIQLTQSPSTLSASVGDRVNITCRVSQRITSWLAWYQQKPGKAPKVLISKTSSLEGGVPSRFSGSGSGTEFTLTISSLQPDDFATYYCQQYSEFSYTFGQGTKLEIK

SEQ ID NO: 1124 - protein, 480 aa, Artificial Sequence
  Description of Artificial Sequence: Synthetic polypeptide
MGWSCIILFLVATATGVHSQVQLVQSGAEVKKPGASVQVSCQASANTFTNHYIHWVRQAPGQGLEWMGIIYPTGGNTIYAQGFQGRVTMTRDTSLNTIYLELSSLRSEDTAVYYCARDVRVDDSWSGYDLLSGGTYFDYWGQGTLVTVSSASTKGPSVFPLAPSSKSTSGGTAALGCLVKDYFPEPVTVSWNSGALTSGVHTFPAVLQSSGLYSLSSVVTVPSSSLGTQTYICNVNHKPSNTKVDKKVEPKSCDKTHTCPPCPAPELLGGPSVFLFPPKPKDTLMISRTPEVTCVVVDVSHEDPEVKFNWYVDGVEVHNAKTKPREEQYNSTYRVVSVLTVLHQDWLNGKEYKCKVSNKALPAPIEKTISKAKGQPREPQVYTLPPSRDELTKNQVSLTCLVKGFYPSDIAVEWESNGQPENNYKTTPPVLDSDGSFFLYSKLTVDKSRWQQGNVFSCSVLHEALHSHYTQKSLSLSPGK

SEQ ID NO: 1125 - protein, 131 aa, Artificial Sequence
  Description of Artificial Sequence: Synthetic polypeptide
QVQLVQSGAEVKKPGASVQVSCQASANTFTNHYIHWVRQAPGQGLEWMGIIYPTGGNTIYAQGFQGRVTMTRDTSLNTIYLELSSLRSEDTAVYYCARDVRVDDSWSGYDLLSGGTYFDYWGQGTLVTVSS

SEQ ID NO: 1126 - protein, 239 aa, Artificial Sequence
  Description of Artificial Sequence: Synthetic polypeptide
MGWSCIILFLVATATGVHSDIVMTQSPDSLAVSLGERATINCRSSQSVLYSSNNENYLAWYQQKPGQPPKLLIYWASTRESGIPDRFSGSGSGTDFTLTISRLQAEDVAVYYCQQYYSLPRTFGQGTKVEIKRTVAAPSVFIFPPSDEQLKSGTASVVCLLNNFYPREAKVQWKVDNALQSGNSQESVTEQDSKDSTYSLSSTLTLSKADYEKHKVYACEVTHQGLSSPVTKSFNRGEC

SEQ ID NO: 1127 - protein, 113 aa, Artificial Sequence
  Description of Artificial Sequence: Synthetic polypeptide
DIVMTQSPDSLAVSLGERATINCRSSQSVLYSSNNENYLAWYQQKPGQPPKLLIYWASTRESGIPDRFSGSGSGTDFTLTISRLQAEDVAVYYCQQYYSLPRTFGQGTKVEIK

SEQ ID NO: 1128 - protein, 472 aa, Artificial Sequence
  Description of Artificial Sequence: Synthetic polypeptide
MGWSCIILFLVATATGVHSEVQLVESGGGLVQPGGSLRLSCAASGFTFSSYSMNWVRQAPGKGLEWVSYISSSSSTIYYADSVKGRFTISRDNAKNSLYLQMNSLRDEDTAVYYCARMAIVGAYANWGFDYWGQGTLVTVSSASTKGPSVFPLAPSSKSTSGGTAALGCLVKDYFPEPVTVSWNSGALTSGVHTFPAVLQSSGLYSLSSVVTVPSSSLGTQTYICNVNHKPSNTKVDKKVEPKSCDKTHTCPPCPAPELLGGPSVFLFPPKPKDTLMISRTPEVTCVVVDVSHEDPEVKFNWYVDGVEVHNAKTKPREEQYNSTYRVVSVLTVLHQDWLNGKEYKCKVSNKALPAPIEKTISKAKGQPREPQVYTLPPSRDELTKNQVSLTCLVKGFYPSDIAVEWESNGQPENNYKTTPPVLDSDGSFFLYSKLTVDKSRWQQGNVFSCSVLHEALHSHYTQKSLSLSPGK

SEQ ID NO: 1129 - protein, 123 aa, Artificial Sequence
  Description of Artificial Sequence: Synthetic polypeptide
EVQLVESGGGLVQPGGSLRLSCAASGFTFSSYSMNWVRQAPGKGLEWVSYISSSSSTIYYADSVKGRFTISRDNAKNSLYLQMNSLRDEDTAVYYCARMAIVGAYANWGFDYWGQGTLVTVSS

SEQ ID NO: 1130 - protein, 233 aa, Artificial Sequence
  Description of Artificial Sequence: Synthetic polypeptide
MGWSCIILFLVATATGVHSDIQMTQSPSSLSASVGDRVTITCQASQDISNYLNWYQQKPGKAPKLLIYDASNLETGVPSRFSGSGSGTDFTFTISSLQPEDIATYYCQQYDNPLITFGQGTRLEIKRTVAAPSVFIFPPSDEQLKSGTASVVCLLNNFYPREAKVQWKVDNALQSGNSQESVTEQDSKDSTYSLSSTLTLSKADYEKHKVYACEVTHQGLSSPVTKSFNRGEC

SEQ ID NO: 1131 - protein, 107 aa, Artificial Sequence
  Description of Artificial Sequence: Synthetic polypeptide
DIQMTQSPSSLSASVGDRVTITCQASQDISNYLNWYQQKPGKAPKLLIYDASNLETGVPSRFSGSGSGTDFTFTISSLQPEDIATYYCQQYDNPLITFGQGTRLEIK

SEQ ID NO: 1132 - protein, 472 aa, Artificial Sequence
  Description of Artificial Sequence: Synthetic polypeptide
MGWSCIILFLVATATGVHSQVQLVQSGAEVKKPGASVKVSCKVSGYTLIELSMHWVRQAPGKGLEWMGGFDPEDGETIYAQKFQGRVTMTEDTSTDTAYMELSSLTSEDTAVYYCATTTPFGVVNAIWFDPWGQGTLVTVSSASTKGPSVFPLAPSSKSTSGGTAALGCLVKDYFPEPVTVSWNSGALTSGVHTFPAVLQSSGLYSLSSVVTVPSSSLGTQTYICNVNHKPSNTKVDKKVEPKSCDKTHTCPPCPAPELLGGPSVFLFPPKPKDTLMISRTPEVTCVVVDVSHEDPEVKFNWYVDGVEVHNAKTKPREEQYNATYRVVSVLTVLHQDWLNGKEYKCKVSNKALPAPIAATISKAKGQPREPQVYTLPPSRDELTKNQVSLTCLVKGFYPSDIAVEWESNGQPENNYKTTPPVLDSDGSFFLYSKLTVDKSRWQQGNVFSCSVMHEALHAHYTQKSLSLSPGK

SEQ ID NO: 1133 - protein, 123 aa, Artificial Sequence
  Description of Artificial Sequence: Synthetic polypeptide
QVQLVQSGAEVKKPGASVKVSCKVSGYTLIELSMHWVRQAPGKGLEWMGGFDPEDGETIYAQKFQGRVTMTEDTSTDTAYMELSSLTSEDTAVYYCATTTPFGVVNAIWFDPWGQGTLVTVSS

SEQ ID NO: 1134 - protein, 235 aa, Artificial Sequence
  Description of Artificial Sequence: Synthetic polypeptide
MGWSCIILFLVATATGSWAQSVLTQPPSVSAAPGQKVTISCSGSSSNIGNNYVSWYQQLPGTAPKLLIYENNKRPSGIPDRFSGSKSGTSATLAITGLQTGDEADYCCGTWDSSLSAGVFGGGTKLTVLGQPKANPTVTLFPPSSEELQANKATLVCLISDFYPGAVTVAWKADSSPVKAGVETTTPSKQSNNKYAASSYLSLTPEQWKSHRSYSCQVTHEGSTVEKTVAPTECS

SEQ ID NO: 1135 - protein, 110 aa, Artificial Sequence
  Description of Artificial Sequence: Synthetic polypeptide
QSVLTQPPSVSAAPGQKVTISCSGSSSNIGNNYVSWYQQLPGTAPKLLIYENNKRPSGIPDRFSGSKSGTSATLAITGLQTGDEADYCCGTWDSSLSAGVFGGGTKLTVL

SEQ ID NO: 1136 - protein, 471 aa, Artificial Sequence
  Description of Artificial Sequence: Synthetic polypeptide
MGWSCIILFLVATATGVHSQVQLVQSGAEVKKPGASVKVSCKVSGYTLIELSMHWVRQAPGKGLEWMGGFDPEDGETIYAQKFQGRVTMTEDTSTDTAYMELSSLRSEDTAVYYCATGSPFGVVTSWFDPWGQGTLVTVSSASTKGPSVFPLAPSSKSTSGGTAALGCLVKDYFPEPVTVSWNSGALTSGVHTFPAVLQSSGLYSLSSVVTVPSSSLGTQTYICNVNHKPSNTKVDKKVEPKSCDKTHTCPPCPAPELLGGPSVFLFPPKPKDTLMISRTPEVTCVVVDVSHEDPEVKFNWYVDGVEVHNAKTKPREEQYNSTYRVVSVLTVLHQDWLNGKEYKCKVSNKALPAPIEKTISKAKGQPREPQVYTLPPSRDELTKNQVSLTCLVKGFYPSDIAVEWESNGQPENNYKTTPPVLDSDGSFFLYSKLTVDKSRWQQGNVFSCSVLHEALHSHYTQKSLSLSPGK

SEQ ID NO: 1137 - protein, 122 aa, Artificial Sequence
  Description of Artificial Sequence: Synthetic polypeptide
QVQLVQSGAEVKKPGASVKVSCKVSGYTLIELSMHWVRQAPGKGLEWMGGFDPEDGETIYAQKFQGRVTMTEDTSTDTAYMELSSLRSEDTAVYYCATGSPFGVVTSWFDPWGQGTLVTVSS

SEQ ID NO: 1138 - protein, 236 aa, Artificial Sequence
  Description of Artificial Sequence: Synthetic polypeptide
MGWSCIILFLVATATGSWAQSALTQPPSASGSPGQSVTISCTGTSSDVGGYNYVSWYQQHPGKAPKLMIYEVTKRPSRVPDRFSASKSGNTASLTVSGLQAEDEADYYCSSYAGSNNPYVFGPGTKVTVLGQPKANPTVTLFPPSSEELQANKATLVCLISDFYPGAVTVAWKADSSPVKAGVETTTPSKQSNNKYAASSYLSLTPEQWKSHRSYSCQVTHEGSTVEKTVAPTECS

SEQ ID NO: 1139 - protein, 111 aa, Artificial Sequence
  Description of Artificial Sequence: Synthetic polypeptide
QSALTQPPSASGSPGQSVTISCTGTSSDVGGYNYVSWYQQHPGKAPKLMIYEVTKRPSRVPDRFSASKSGNTASLTVSGLQAEDEADYYCSSYAGSNNPYVFGPGTKVTVL

SEQ ID NO: 1140 - protein, 473 aa, Artificial Sequence
  Description of Artificial Sequence: Synthetic polypeptide
MGWSCIILFLVATATGVHSQVQLVESGGGVVQPGRSLRLSCAASGFTFSSYGMHWVRQAPGKGLEWVAFIWYDGSNIYYTDSVKGRFTISRDNSKNTLYLQMNSLRAEDTAVYYCARDRVDSSSWGFYFDYWGQGTLVTVSSSASTKGPSVFPLAPSSKSTSGGTAALGCLVKDYFPEPVTVSWNSGALTSGVHTFPAVLQSSGLYSLSSVVTVPSSSLGTQTYICNVNHKPSNTKVDKKVEPKSCDKTHTCPPCPAPELLGGPSVFLFPPKPKDTLMISRTPEVTCVVVDVSHEDPEVKFNWYVDGVEVHNAKTKPREEQYNSTYRVVSVLTVLHQDWLNGKEYKCKVSNKALPAPIEKTISKAKGQPREPQVYTLPPSRDELTKNQVSLTCLVKGFYPSDIAVEWESNGQPENNYKTTPPVLDSDGSFFLYSKLTVDKSRWQQGNVFSCSVLHEALHSHYTQKSLSLSPGK

SEQ ID NO: 1141 - protein, 124 aa, Artificial Sequence
  Description of Artificial Sequence: Synthetic polypeptide
QVQLVESGGGVVQPGRSLRLSCAASGFTFSSYGMHWVRQAPGKGLEWVAFIWYDGSNIYYTDSVKGRFTISRDNSKNTLYLQMNSLRAEDTAVYYCARDRVDSSSWGFYFDYWGQGTLVTVSSS

SEQ ID NO: 1142 - protein, 234 aa, Artificial Sequence
  Description of Artificial Sequence: Synthetic polypeptide
MGWSCIILFLVATATGSWASYELTQPPSVSVSPGQTARITCSGDALPKKYAYWYQQKSGQAPVLVIYEDSKRPSRIPERFSGSSSGTMATLTISGAQVEDEADYYCYSTDSSINHSGVFGGGTKLTVLGQPKANPTVTLFPPSSEELQANKATLVCLISDFYPGAVTVAWKADSSPVKAGVETTTPSKQSNNKYAASSYLSLTPEQWKSHRSYSCQVTHEGSTVEKTVAPTECS

SEQ ID NO: 1143 - protein, 109 aa, Artificial Sequence
  Description of Artificial Sequence: Synthetic polypeptide
SYELTQPPSVSVSPGQTARITCSGDALPKKYAYWYQQKSGQAPVLVIYEDSKRPSRIPERFSGSSSGTMATLTISGAQVEDEADYYCYSTDSSINHSGVFGGGTKLTVL

SEQ ID NO: 1144 - protein, 471 aa, Artificial Sequence
  Description of Artificial Sequence: Synthetic polypeptide
MGWSCIILFLVATATGVHSQVQLVQSGAEVKKPGASVKVSCKVSGYTLPELSMHWVRQAPGKGLEWMGGFHPEDGETIYAQKFQGRVTMTEDTSTDTAYMELSSLRSEDTAVYYCATGSPFGVVTDWFDPWGRGTLVTVSSASTKGPSVFPLAPSSKSTSGGTAALGCLVKDYFPEPVTVSWNSGALTSGVHTFPAVLQSSGLYSLSSVVTVPSSSLGTQTYICNVNHKPSNTKVDKKVEPKSCDKTHTCPPCPAPELLGGPSVFLFPPKPKDTLMISRTPEVTCVVVDVSHEDPEVKFNWYVDGVEVHNAKTKPREEQYNSTYRVVSVLTVLHQDWLNGKEYKCKVSNKALPAPIEKTISKAKGQPREPQVYTLPPSRDELTKNQVSLTCLVKGFYPSDIAVEWESNGQPENNYKTTPPVLDSDGSFFLYSKLTVDKSRWQQGNVFSCSVLHEALHSHYTQKSLSLSPGK

SEQ ID NO: 1145 - protein, 122 aa, Artificial Sequence
  Description of Artificial Sequence: Synthetic polypeptide
QVQLVQSGAEVKKPGASVKVSCKVSGYTLPELSMHWVRQAPGKGLEWMGGFHPEDGETIYAQKFQGRVTMTEDTSTDTAYMELSSLRSEDTAVYYCATGSPFGVVTDWFDPWGRGTLVTVSS

SEQ ID NO: 1146 - protein, 236 aa, Artificial Sequence
  Description of Artificial Sequence: Synthetic polypeptide
MGWSCIILFLVATATGSWAQSALTQPPSASGSPGQSVTISCTGTSSDVGGYNYVSWYQQHPGKAPKLMIYEVSKRPSGVPDRFSGSKSGNTASLTVSGLQAEDEADYYCSSYAGSNNPYVFGTGTKVTVLGQPKANPTVTLFPPSSEELQANKATLVCLISDFYPGAVTVAWKADSSPVKAGVETTTPSKQSNNKYAASSYLSLTPEQWKSHRSYSCQVTHEGSTVEKTVAPTECS

SEQ ID NO: 1147 - protein, 111 aa, Artificial Sequence
  Description of Artificial Sequence: Synthetic polypeptide
QSALTQPPSASGSPGQSVTISCTGTSSDVGGYNYVSWYQQHPGKAPKLMIYEVSKRPSGVPDRFSGSKSGNTASLTVSGLQAEDEADYYCSSYAGSNNPYVFGTGTKVTVL

SEQ ID NO: 1148 - protein, 477 aa, Artificial Sequence
  Description of Artificial Sequence: Synthetic polypeptide
MGWSCIILFLVATATGVHSEVQLVESGAEVKKPGATVKISCKVSGYTFTDYYMHWVQQAPGKGLEWMGLVDPEDGETIYAEKFQGRVTITADTSTDTAYMELSSLRSEDTAVYYCATSSGPSRLCGGGSCYHSFDYWGQGTLVTVSSASTKGPSVFPLAPSSKSTSGGTAALGCLVKDYFPEPVTVSWNSGALTSGVHTFPAVLQSSGLYSLSSVVTVPSSSLGTQTYICNVNHKPSNTKVDKKVEPKSCDKTHTCPPCPAPELLGGPSVFLFPPKPKDTLMISRTPEVTCVVVDVSHEDPEVKFNWYVDGVEVHNAKTKPREEQYNATYRVVSVLTVLHQDWLNGKEYKCKVSNKALPAPIAATISKAKGQPREPQVYTLPPSRDELTKNQVSLTCLVKGFYPSDIAVEWESNGQPENNYKTTPPVLDSDGSFFLYSKLTVDKSRWQQGNVFSCSVMHEALHAHYTQKSLSLSPGK

SEQ ID NO: 1149 - protein, 128 aa, Artificial Sequence
  Description of Artificial Sequence: Synthetic polypeptide
EVQLVESGAEVKKPGATVKISCKVSGYTFTDYYMHWVQQAPGKGLEWMGLVDPEDGETIYAEKFQGRVTITADTSTDTAYMELSSLRSEDTAVYYCATSSGPSRLCGGGSCYHSFDYWGQGTLVTVSS

SEQ ID NO: 1150 - protein, 235 aa, Artificial Sequence
  Description of Artificial Sequence: Synthetic polypeptide
MGWSCIILFLVATATGVHSEIVLTQSPGTLSLSPGERATLSCRASQSVSSSYLAWYQQKPGQAPRLLIYGASSRATGIPDRFSGSGSGTDFTLTISRLEPEDFAVYYCQQYGSSPTWTFGQGTKVEIKRTVAAPSVFIFPPSDEQLKSGTASVVCLLNNFYPREAKVQWKVDNALQSGNSQESVTEQDSKDSTYSLSSTLTLSKADYEKHKVYACEVTHQGLSSPVTKSFNRGEC

SEQ ID NO: 1151 - protein, 109 aa, Artificial Sequence
  Description of Artificial Sequence: Synthetic polypeptide
EIVLTQSPGTLSLSPGERATLSCRASQSVSSSYLAWYQQKPGQAPRLLIYGASSRATGIPDRFSGSGSGTDFTLTISRLEPEDFAVYYCQQYGSSPTWTFGQGTKVEIK

SEQ ID NO: 1152 - protein, 468 aa, Artificial Sequence
  Description of Artificial Sequence: Synthetic polypeptide
MGWSCIILFLVATATGVHSEVQLVESGGAVVQPGGSLRLSCAASGFTFDAYTMHWVRQTPGRGLEWLSLISWDGSTFYAESLKGRFTVSRDNSKNSLYLQMSSLRADDTALYYCAKAKDPYTEYFDYWGQGTLVTVSSASTKGPSVFPLAPSSKSTSGGTAALGCLVKDYFPEPVTVSWNSGALTSGVHTFPAVLQSSGLYSLSSVVTVPSSSLGTQTYICNVNHKPSNTKVDKKVEPKSCDKTHTCPPCPAPELLGGPSVFLFPPKPKDTLMISRTPEVTCVVVDVSHEDPEVKFNWYVDGVEVHNAKTKPREEQYNSTYRVVSVLTVLHQDWLNGKEYKCKVSNKALPAPIEKTISKAKGQPREPQVYTLPPSRDELTKNQVSLTCLVKGFYPSDIAVEWESNGQPENNYKTTPPVLDSDGSFFLYSKLTVDKSRWQQGNVFSCSVLHEALHSHYTQKSLSLSPGK

SEQ ID NO: 1153 - protein, 119 aa, Artificial Sequence
  Description of Artificial Sequence: Synthetic polypeptide
EVQLVESGGAVVQPGGSLRLSCAASGFTFDAYTMHWVRQTPGRGLEWLSLISWDGSTFYAESLKGRFTVSRDNSKNSLYLQMSSLRADDTALYYCAKAKDPYTEYFDYWGQGTLVTVSS

SEQ ID NO: 1154 - protein, 233 aa, Artificial Sequence
  Description of Artificial Sequence: Synthetic polypeptide
MGWSCIILFLVATATGVHSDIQMTQSPSTLSASVGDRVTITCRASQTINSWLAWYQMKPGKAPKVLIYKASSLESGVPSRFSGSGSGTEFTLTISSLQPDDFATYYCQQYYIYSLSFGGGTKVEIKRTVAAPSVFIFPPSDEQLKSGTASVVCLLNNFYPREAKVQWKVDNALQSGNSQESVTEQDSKDSTYSLSSTLTLSKADYEKHKVYACEVTHQGLSSPVTKSFNRGEC

SEQ ID NO: 1155 - protein, 107 aa, Artificial Sequence
  Description of Artificial Sequence: Synthetic polypeptide
DIQMTQSPSTLSASVGDRVTITCRASQTINSWLAWYQMKPGKAPKVLIYKASSLESGVPSRFSGSGSGTEFTLTISSLQPDDFATYYCQQYYIYSLSFGGGTKVEIK

SEQ ID NO: 1156 - protein, 471 aa, Artificial Sequence
  Description of Artificial Sequence: Synthetic polypeptide
MGWSCIILFLVATATGVHSEVQLVESGGGLIQPGGSLRLSCAASGFTVSSNYMSWVRQAPGKGLEWVSVIYSGGSTYYADSVKGRFIISRDNSKNTLYLQMDSLRAEDTAVYYCARGDIVGATWDPAFDIWGQGTLVTVSSASTKGPSVFPLAPSSKSTSGGTAALGCLVKDYFPEPVTVSWNSGALTSGVHTFPAVLQSSGLYSLSSVVTVPSSSLGTQTYICNVNHKPSNTKVDKKVEPKSCDKTHTCPPCPAPELLGGPSVFLFPPKPKDTLMISRTPEVTCVVVDVSHEDPEVKFNWYVDGVEVHNAKTKPREEQYNSTYRVVSVLTVLHQDWLNGKEYKCKVSNKALPAPIEKTISKAKGQPREPQVYTLPPSRDELTKNQVSLTCLVKGFYPSDIAVEWESNGQPENNYKTTPPVLDSDGSFFLYSKLTVDKSRWQQGNVFSCSVLHEALHSHYTQKSLSLSPGK

SEQ ID NO: 1157 - protein, 122 aa, Artificial Sequence
  Description of Artificial Sequence: Synthetic polypeptide
EVQLVESGGGLIQPGGSLRLSCAASGFTVSSNYMSWVRQAPGKGLEWVSVIYSGGSTYYADSVKGRFIISRDNSKNTLYLQMDSLRAEDTAVYYCARGDIVGATWDPAFDIWGQGTLVTVSS

SEQ ID NO: 1158 - protein, 234 aa, Artificial Sequence
  Description of Artificial Sequence: Synthetic polypeptide
MGWSCIILFLVATATGSWASYVLTQPPSVSVAPGKTARITCGGNNIGSKSVHWYQQKPGQAPVLVIYYASARPSGIPERFSGSNSGNTATLTISRVEAGDEADYYCQVWDTSSDHSVVFGGGTKLTVLGQPKANPTVTLFPPSSEELQANKATLVCLISDFYPGAVTVAWKADSSPVKAGVETTTPSKQSNNKYAASSYLSLTPEQWKSHRSYSCQVTHEGSTVEKTVAPTECS

SEQ ID NO: 1159 - protein, 109 aa, Artificial Sequence
  Description of Artificial Sequence: Synthetic polypeptide
SYVLTQPPSVSVAPGKTARITCGGNNIGSKSVHWYQQKPGQAPVLVIYYASARPSGIPERFSGSNSGNTATLTISRVEAGDEADYYCQVWDTSSDHSVVFGGGTKLTVL

SEQ ID NO: 1160 - protein, 472 aa, Artificial Sequence
  Description of Artificial Sequence: Synthetic polypeptide
MGWSCIILFLVATATGVHSQVTLRESGPALVKPTQTLTLTCTFSGFSLSTSGMCVSWIRQPPGKALEWLALIDWDDDKYYSTSLKTRLTISKDTSKNQVVLTMTNMDPVDTATYYCARINAYSSSWPTFDYWGQGTLVTVSSASTKGPSVFPLAPSSKSTSGGTAALGCLVKDYFPEPVTVSWNSGALTSGVHTFPAVLQSSGLYSLSSVVTVPSSSLGTQTYICNVNHKPSNTKVDKKVEPKSCDKTHTCPPCPAPELLGGPSVFLFPPKPKDTLMISRTPEVTCVVVDVSHEDPEVKFNWYVDGVEVHNAKTKPREEQYNSTYRVVSVLTVLHQDWLNGKEYKCKVSNKALPAPIEKTISKAKGQPREPQVYTLPPSRDELTKNQVSLTCLVKGFYPSDIAVEWESNGQPENNYKTTPPVLDSDGSFFLYSKLTVDKSRWQQGNVFSCSVLHEALHSHYTQKSLSLSPGK

SEQ ID NO: 1161 - protein, 123 aa, Artificial Sequence
  Description of Artificial Sequence: Synthetic polypeptide
QVTLRESGPALVKPTQTLTLTCTFSGFSLSTSGMCVSWIRQPPGKALEWLALIDWDDDKYYSTSLKTRLTISKDTSKNQVVLTMTNMDPVDTATYYCARINAYSSSWPTFDYWGQGTLVTVSS

SEQ ID NO: 1162 - protein, 234 aa, Artificial Sequence
  Description of Artificial Sequence: Synthetic polypeptide
MGWSCIILFLVATATGVHSEIVLTQSPGTLSLSPGERATLSCRASQSVSSSYLAWYQQKPGQAPRLLIYGASSRATGIPDRFSGSGSGTDFTLTISRLEPEDFAVYYCQQYGSSSWTFGQGTKVEIKRTVAAPSVFIFPPSDEQLKSGTASVVCLLNNFYPREAKVQWKVDNALQSGNSQESVTEQDSKDSTYSLSSTLTLSKADYEKHKVYACEVTHQGLSSPVTKSFNRGEC

SEQ ID NO: 1163 - protein, 108 aa, Artificial Sequence
  Description of Artificial Sequence: Synthetic polypeptide
EIVLTQSPGTLSLSPGERATLSCRASQSVSSSYLAWYQQKPGQAPRLLIYGASSRATGIPDRFSGSGSGTDFTLTISRLEPEDFAVYYCQQYGSSSWTFGQGTKVEIK

SEQ ID NO: 1164 - protein, 472 aa, Artificial Sequence
  Description of Artificial Sequence: Synthetic polypeptide
MGWSCIILFLVATATGVHSQLQLQESGPGLVKPSETLSLTCTVSGGSISSSSYYWGWIRQPPGKGPEWIGSIYYGGTTYYNPSLRSRVTISLDMSKNQISLKLSSVTATDTAVYYCARSSSGFSYDTPLDPWGQGTLVIVSSASTKGPSVFPLAPSSKSTSGGTAALGCLVKDYFPEPVTVSWNSGALTSGVHTFPAVLQSSGLYSLSSVVTVPSSSLGTQTYICNVNHKPSNTKVDKKVEPKSCDKTHTCPPCPAPELLGGPSVFLFPPKPKDTLMISRTPEVTCVVVDVSHEDPEVKFNWYVDGVEVHNAKTKPREEQYNSTYRVVSVLTVLHQDWLNGKEYKCKVSNKALPAPIEKTISKAKGQPREPQVYTLPPSRDELTKNQVSLTCLVKGFYPSDIAVEWESNGQPENNYKTTPPVLDSDGSFFLYSKLTVDKSRWQQGNVFSCSVLHEALHSHYTQKSLSLSPGK

SEQ ID NO: 1165 - protein, 123 aa, Artificial Sequence
  Description of Artificial Sequence: Synthetic polypeptide
QLQLQESGPGLVKPSETLSLTCTVSGGSISSSSYYWGWIRQPPGKGPEWIGSIYYGGTTYYNPSLRSRVTISLDMSKNQISLKLSSVTATDTAVYYCARSSSGFSYDTPLDPWGQGTLVIVSS

SEQ ID NO: 1166 - protein, 233 aa, Artificial Sequence
  Description of Artificial Sequence: Synthetic polypeptide
MGWSCIILFLVATATGVHSDIQMTQSPSSLSASVGDRVTITCRASQGIRNDLGWFQQKPGKAPKRLIYAASSLQSGVPSRFSGSGSGTEFTLTISSLQPEDFATYYCLQHNSYPITFGQGTRLEIKRTVAAPSVFIFPPSDEQLKSGTASVVCLLNNFYPREAKVQWKVDNALQSGNSQESVTEQDSKDSTYSLSSTLTLSKADYEKHKVYACEVTHQGLSSPVTKSFNRGEC

SEQ ID NO: 1167 - protein, 107 aa, Artificial Sequence
  Description of Artificial Sequence: Synthetic polypeptide
DIQMTQSPSSLSASVGDRVTITCRASQGIRNDLGWFQQKPGKAPKRLIYAASSLQSGVPSRFSGSGSGTEFTLTISSLQPEDFATYYCLQHNSYPITFGQGTRLEIK

SEQ ID NO: 1168 - protein, 471 aa, Artificial Sequence
  Description of Artificial Sequence: Synthetic polypeptide
MGWSCIILFLVATATGVHSEVQLVESGTEVKKPGASVKVSCKTSGYIFTNYYIHWVRQAPGQGLEWMGIFNPNGGGTSYAQKFQGRITLTGNTSANTGYMVLRSLTSEDTAVYYCARDPRTSGDNDGFDMWGQGTKVTVSSASTKGPSVFPLAPSSKSTSGGTAALGCLVKDYFPEPVTVSWNSGALTSGVHTFPAVLQSSGLYSLSSVVTVPSSSLGTQTYICNVNHKPSNTKVDKKVEPKSCDKTHTCPPCPAPELLGGPSVFLFPPKPKDTLMISRTPEVTCVVVDVSHEDPEVKFNWYVDGVEVHNAKTKPREEQYNATYRVVSVLTVLHQDWLNGKEYKCKVSNKALPAPIAATISKAKGQPREPQVYTLPPSRDELTKNQVSLTCLVKGFYPSDIAVEWESNGQPENNYKTTPPVLDSDGSFFLYSKLTVDKSRWQQGNVFSCSVMHEALHAHYTQKSLSLSPGK

SEQ ID NO: 1169 - protein, 122 aa, Artificial Sequence
  Description of Artificial Sequence: Synthetic polypeptide
EVQLVESGTEVKKPGASVKVSCKTSGYIFTNYYIHWVRQAPGQGLEWMGIFNPNGGGTSYAQKFQGRITLTGNTSANTGYMVLRSLTSEDTAVYYCARDPRTSGDNDGFDMWGQGTKVTVSS

SEQ ID NO: 1170 - protein, 235 aa, Artificial Sequence
  Description of Artificial Sequence: Synthetic polypeptide
MGWSCIILFLVATATGVHSVLTQSPATLSLSPGERATLSCRASQSLSSYNYLAWYQQKPGQAPRLLIYAASKRATGIPARFSGSGSGTDFTLTISSLEPEDFAVYFCQQRSNRPPAWTFGQGTKVEIKRTVAAPSVFIFPPSDEQLKSGTASVVCLLNNFYPREAKVQWKVDNALQSGNSQESVTEQDSKDSTYSLSSTLTLSKADYEKHKVYACEVTHQGLSSPVTKSFNRGEC

SEQ ID NO: 1171 - protein, 109 aa, Artificial Sequence
  Description of Artificial Sequence: Synthetic polypeptide
VLTQSPATLSLSPGERATLSCRASQSLSSYNYLAWYQQKPGQAPRLLIYAASKRATGIPARFSGSGSGTDFTLTISSLEPEDFAVYFCQQRSNRPPAWTFGQGTKVEIK

SEQ ID NO: 1172 - protein, 481 aa, Artificial Sequence
  Description of Artificial Sequence: Synthetic polypeptide
MGWSCIILFLVATATGVHSQVQLVQSGGGVVQPGRSLRLSCAASGFNFGDFGMHWVRQAPGKGLEWVAVISYEGRNKNHADSVRGRFTISRDNSRNMLYLQMNSLRRGDTAVYYCAKENRDRNYDSWSASYSDYYYGMDVWGQGTTVTVSSASTKGPSVFPLAPSSKSTSGGTAALGCLVKDYFPEPVTVSWNSGALTSGVHTFPAVLQSSGLYSLSSVVTVPSSSLGTQTYICNVNHKPSNTKVDKKVEPKSCDKTHTCPPCPAPELLGGPSVFLFPPKPKDTLMISRTPEVTCVVVDVSHEDPEVKFNWYVDGVEVHNAKTKPREEQYNATYRVVSVLTVLHQDWLNGKEYKCKVSNKALPAPIAATISKAKGQPREPQVYTLPPSRDELTKNQVSLTCLVKGFYPSDIAVEWESNGQPENNYKTTPPVLDSDGSFFLYSKLTVDKSRWQQGNVFSCSVMHEALHAHYTQKSLSLSPGK

SEQ ID NO: 1173 - protein, 132 aa, Artificial Sequence
  Description of Artificial Sequence: Synthetic polypeptide
QVQLVQSGGGVVQPGRSLRLSCAASGFNFGDFGMHWVRQAPGKGLEWVAVISYEGRNKNHADSVRGRFTISRDNSRNMLYLQMNSLRRGDTAVYYCAKENRDRNYDSWSASYSDYYYGMDVWGQGTTVTVSS

SEQ ID NO: 1174 - protein, 234 aa, Artificial Sequence
  Description of Artificial Sequence: Synthetic polypeptide
MGWSCIILFLVATATGVHSDIVMTQSPSFLSASVGDRVTITCRASQGIDRYLAWYQQKPGSAPKLLIYAASTLQSGVPSRFSGSGSETDFTLTISSLQPDDFATYYCQQLSTYPTITFGQGTRLEIKRTVAAPSVFIFPPSDEQLKSGTASVVCLLNNFYPREAKVQWKVDNALQSGNSQESVTEQDSKDSTYSLSSTLTLSKADYEKHKVYACEVTHQGLSSPVTKSFNRGEC

SEQ ID NO: 1175 - protein, 108 aa, Artificial Sequence
  Description of Artificial Sequence: Synthetic polypeptide
DIVMTQSPSFLSASVGDRVTITCRASQGIDRYLAWYQQKPGSAPKLLIYAASTLQSGVPSRFSGSGSETDFTLTISSLQPDDFATYYCQQLSTYPTITFGQGTRLEIK

SEQ ID NO: 1176 - DNA, 1425 bp, Artificial Sequence
  Description of Artificial Sequence: Synthetic polynucleotide
atgggatggtcatgtatcatcctttttctagtagcaactgcaaccggtgtacattccgaggtgcagctggtggagtctgggggaggcttggtccagcctggggggtccctgagactctcctgtgcagcctctggagtcacctttagtagctattggatgagttgggtccgccaggctccaggaaaagggctggagtgggtggccaacataagacaagatggaagtgagaaatactctgtggactctgtgaagggccgattcaccatctccagagacaacgccaagaactcactgtatctgcaaatgaacagcctgagagccgaggacacggctgtgtattactgtgcgagggctcgaagggctgataatagtggttattacgggtttcactttgactgctggggccagggaaccctggtcaccgtctcctcagcgtcgaccaagggcccatcggtcttccccctggcaccctcctccaagagcacctctgggggcacagcggccctgggctgcctggtcaaggactacttccccgaaccagtgacggtgtcgtggaactcaggcgccctgaccagcggcgtgcacaccttcccggctgtcctacagtcctcaggactctactccctcagcagcgtggtgaccgtgccctccagcagcttgggcacccagacctacatctgcaacgtgaatcacaagcccagcaacaccaaggtggacaagaaagttgagcccaaatcttgtgacaaaactcacacatgcccaccgtgcccagcacctgaactcctggggggaccgtcagtcttcctcttccccccaaaacccaaggacaccctcatgatctcccggacccctgaggtcacatgcgtggtggtggacgtgagccacgaagaccctgaggtcaagttcaactggtacgtggacggcgtggaggtgcataatgccaagacaaagccgcgggaggagcagtacaacagcacgtaccgtgtggtcagcgtcctcaccgtcctgcaccaggactggctgaatggcaaggagtacaagtgcaaggtctccaacaaagccctcccagcccccatcgagaaaaccatctccaaagccaaagggcagccccgagaaccacaggtgtacaccctgcccccatcccgggatgagctgaccaagaaccaggtcagcctgacctgcctggtcaaaggcttctatcccagcgacatcgccgtggagtgggagagcaatgggcagccggagaacaactacaagaccacgcctcccgtgctggactccgacggctccttcttcctctacagcaagctcaccgtggacaagagcaggtggcagcaggggaacgtcttctcatgctccgtgctgcatgaggctctgcacagccactacacgcagaagagcctctccctgtctccgggtaaatga

SEQ ID NO: 1177 - DNA, 711 bp, Artificial Sequence
  Description of Artificial Sequence: Synthetic polynucleotide
atgggatggtcatgtatcatcctttttctagtagcaactgcaaccggttcctgggcccagtctgtgctgacgcagccgccctcagtgtctggggccccagggcagagggtcaccatctcctgcactgggagcagctccaacatcggggcaggttatgatgtacactggtaccagcagcttccaggaacagcccccaaactcctcatctatggtaacaataatcggccctcaggggtccctgaccgattctctgactccaagtctggcacctcagcctccctggccatcactaggctccaggctgaggatgaggctgattattactgccagtcctatgacagcagcctgagtggttgggtgttcggcggagggaccaagttgaccgtcctaggtcagcccaaggccaaccccactgtcactctgttcccgccctcgagtgaggagcttcaagccaacaaggccacactggtgtgtctcataagtgacttctacccgggagccgtgacagtggcctggaaggcagatagcagccccgtcaaggcgggagtggagaccaccacaccctccaaacaaagcaacaacaagtacgcggccagcagctacctgagcctgacgcctgagcagtggaagtcccacagaagctacagctgccaggtcacgcatgaagggagcaccgtggagaagacagtggcccctacagaatgttcatag

SEQ ID NO: 1178 - DNA, 1419 bp, Artificial Sequence
  Description of Artificial Sequence: Synthetic polynucleotide
atgggatggtcatgtatcatcctttttctagtagcaactgcaaccggtgtacattcccaggtccagctggtgcagtctggggctgaggtgaagaagcctgggtcctcggtgaaggtctcctgcaaggcttctggaggcaccttcagcagctatgctatcagctgggtgcgacaggcccctggacaagggcttgagtggatgggaaggatcatccctatgtttggtatagcaaattacgcacagaagttccagggcagagtcacgattaccgcggacaaatccacgagcacagcctacttggagctgagcagcctgagatctgaggacacggccgtgtactactgtgcgagatatatggtgacacgggaccagtactactacgatatggacgtctggggccaagggaccacggtcaccgtctcgtcagcgtcgaccaagggcccatcggtcttccccctggcaccctcctccaagagcacctctgggggcacagcggccctgggctgcctggtcaaggactacttccccgaaccagtgacggtgtcgtggaactcaggcgccctgaccagcggcgtgcacaccttcccggctgtcctacagtcctcaggactctactccctcagcagcgtggtgaccgtgccctccagcagcttgggcacccagacctacatctgcaacgtgaatcacaagcccagcaacaccaaggtggacaagaaagttgagcccaaatcttgtgacaaaactcacacatgcccaccgtgcccagcacctgaactcctggggggaccgtcagtcttcctcttccccccaaaacccaaggacaccctcatgatctcccggacccctgaggtcacatgcgtggtggtggacgtgagccacgaagaccctgaggtcaagttcaactggtacgtggacggcgtggaggtgcataatgccaagacaaagccgcgggaggagcagtacaacagcacgtaccgtgtggtcagcgtcctcaccgtcctgcaccaggactggctgaatggcaaggagtacaagtgcaaggtctccaacaaagccctcccagcccccatcgagaaaaccatctccaaagccaaagggcagccccgagaaccacaggtgtacaccctgcccccatcccgggatgagctgaccaagaaccaggtcagcctgacctgcctggtcaaaggcttctatcccagcgacatcgccgtggagtgggagagcaatgggcagccggagaacaactacaagaccacgcctcccgtgctggactccgacggctccttcttcctctacagcaagctcaccgtggacaagagcaggtggcagcaggggaacgtcttctcatgctccgtgctgcatgaggctctgcacagccactacacgcagaagagcctctccctgtctccgggtaaatga

SEQ ID NO: 1179 - DNA, 704 bp, Artificial Sequence
  Description of Artificial Sequence: Synthetic polynucleotide
atgggatggtcatgtatcatcctttttctagtagcaactgcaaccggtgtacattcagacatccagatgacccagtctccatcctccctgtctgcatctgtaggagacagagtcaccatcacttgccgggcaagtcagagcattagcaactatttaaattggtatcagcagaaaccagggaaagcccctaagctcctgatctatgctgcatccagtttgcaaagtggggtcccatcaaggttcagtggcagtggatctgggacagatttcactctcaccatcagcagtctgcaacctgaagattttgcaacttactactgtcaacagagttacagtccccctcccacttttggccaggggaccaagctggagatcaaacgtacggtggctgcaccatctgtcttcatcttcccgccatctgatgagcagttgaaatctggaactgcctctgttgtgtgcctgctgaataacttctaccccagagaagccaaagtgcagtggaaggtggacaacgccctgcagagcggaaacagccaggaaagcgtgacagagcaggattccaaggattccacatacagcctgagcagcacactgacactgtccaaggccgactacgagaagcacaaggtgtacgcctgcgaagtgacacaccagggactgtcctcccctgtgacaaagagcttcaacagaggagaatgctgata

SEQ ID NO: 1180 - DNA, 1419 bp, Artificial Sequence
  Description of Artificial Sequence: Synthetic polynucleotide
atgggatggtcatgtatcatcctttttctagtagcaactgcaaccggtgtacattcccaggtccagctggtgcagtctggggctgaggtgaagaagcctgggtcctcggtgaaggtctcctgcaaggcttctggaggcaccttcagtaggtatgctatcaactgggtgcgacaggcccctggacaagggcttgagtggatgggaaggatcatccctatctttggtatagcaaactacgcacagaaattccagggcaaagtcacgattaccgcggacaaatccacgagcacagcctacatggagctgagcagcctgagatctgaggacacggccgtgtattactgtgcgagagcggattattactatgatagtagtggttatttctttgactactggggccagggaaccctggtcaccgtctcctcagcgtcgaccaagggcccatcggtcttccccctggcaccctcctccaagagcacctctgggggcacagcggccctgggctgcctggtcaaggactacttccccgaaccagtgacggtgtcgtggaactcaggcgccctgaccagcggcgtgcacaccttcccggctgtcctacagtcctcaggactctactccctcagcagcgtggtgaccgtgccctccagcagcttgggcacccagacctacatctgcaacgtgaatcacaagcccagcaacaccaaggtggacaagaaagttgagcccaaatcttgtgacaaaactcacacatgcccaccgtgcccagcacctgaactcctggggggaccgtcagtcttcctcttccccccaaaacccaaggacaccctcatgatctcccggacccctgaggtcacatgcgtggtggtggacgtgagccacgaagaccctgaggtcaagttcaactggtacgtggacggcgtggaggtgcataatgccaagacaaagccgcgggaggagcagtacaacagcacgtaccgtgtggtcagcgtcctcaccgtcctgcaccaggactggctgaatggcaaggagtacaagtgcaaggtctccaacaaagccctcccagcccccatcgagaaaaccatctccaaagccaaagggcagccccgagaaccacaggtgtacaccctgcccccatcccgggatgagctgaccaagaaccaggtcagcctgacctgcctggtcaaaggcttctatcccagcgacatcgccgtggagtgggagagcaatgggcagccggagaacaactacaagaccacgcctcccgtgctggactccgacggctccttcttcctctacagcaagctcaccgtggacaagagcaggtggcagcaggggaacgtcttctcatgctccgtgctgcatgaggctctgcacagccactacacgcagaagagcctctccctgtctccgggtaaatga

SEQ ID NO: 1181 - DNA, 704 bp, Artificial Sequence
  Description of Artificial Sequence: Synthetic polynucleotide
atgggatggtcatgtatcatcctttttctagtagcaactgcaaccggtgtacattcagaaattgtgttgacgcagtctccaggcaccctgtctttgtctccaggggaaagagccaccctctcctgcagggccagtcagagtgttagcagcagctacttagcctggtaccagcagaaacctggccagactcccaggctcctcatctatggtgcatccagcagggccaccggcatcccagccaggttcagtggcagtgggtctgggacaaacttcactctcaccatcagcagactggagcctgaagattttgcagtgtattactgtcagcagtatagtagctcacggacgttcggccaagggaccaaggtggaaatcaaacgtacggtggctgcaccatctgtcttcatcttcccgccatctgatgagcagttgaaatctggaactgcctctgttgtgtgcctgctgaataacttctaccccagagaagccaaagtgcagtggaaggtggacaacgccctgcagagcggaaacagccaggaaagcgtgacagagcaggattccaaggattccacatacagcctgagcagcacactgacactgtccaaggccgactacgagaagcacaaggtgtacgcctgcgaagtgacacaccagggactgtcctcccctgtgacaaagagcttcaacagaggagaatgctgata

SEQ ID NO: 1182 - DNA, 1437 bp, Artificial Sequence
  Description of Artificial Sequence: Synthetic polynucleotide
atgggatggtcatgtatcatcctttttctagtagcaactgcaaccggtgtacattcccaggtgcagctggtggagtctgggggaggcgtggtccagcctgggaggtccctgagactctcctgtgcagcctctggattcacgttcagtagctatggcatgcactgggtccgccaggctccaggcaaggggctggagtgggtggcagttatatcatttgatggaagtaataaatactatgtagactccgtgaagggccgattcaccatctccagagacaattccaagaacacgctgtatctgcaaatgaacagcctgagagctgaggacacggctgtgtattactgtgcgaaagatatgcacaacgactacggtgactacgtgtcttactacttctactacggtatggacgtctggggccaagggaccacggtcaccgtctcctcagcgtcgaccaagggcccatcggtcttccccctggcaccctcctccaagagcacctctgggggcacagcggccctgggctgcctggtcaaggactacttccccgaaccagtgacggtgtcgtggaactcaggcgccctgaccagcggcgtgcacaccttcccggctgtcctacagtcctcaggactctactccctcagcagcgtggtgaccgtgccctccagcagcttgggcacccagacctacatctgcaacgtgaatcacaagcccagcaacaccaaggtggacaagaaagttgagcccaaatcttgtgacaaaactcacacatgcccaccgtgcccagcacctgaactcctggggggaccgtcagtcttcctcttccccccaaaacccaaggacaccctcatgatctcccggacccctgaggtcacatgcgtggtggtggacgtgagccacgaagaccctgaggtcaagttcaactggtacgtggacggcgtggaggtgcataatgccaagacaaagccgcgggaggagcagtacaacagcacgtaccgtgtggtcagcgtcctcaccgtcctgcaccaggactggctgaatggcaaggagtacaagtgcaaggtctccaacaaagccctcccagcccccatcgagaaaaccatctccaaagccaaagggcagccccgagaaccacaggtgtacaccctgcccccatcccgggatgagctgaccaagaaccaggtcagcctgacctgcctggtcaaaggcttctatcccagcgacatcgccgtggagtgggagagcaatgggcagccggagaacaactacaagaccacgcctcccgtgctggactccgacggctccttcttcctctacagcaagctcaccgtggacaagagcaggtggcagcaggggaacgtcttctcatgctccgtgctgcatgaggctctgcacagccactacacgcagaagagcctctccctgtctccgggtaaatga

SEQ ID NO: 1183 - DNA, 708 bp, Artificial Sequence
  Description of Artificial Sequence: Synthetic polynucleotide
atgggatggtcatgtatcatcctttttctagtagcaactgcaaccggttcctgggcccagtctgtgttgacgcagccgccctcagtgtctgcggccccaggacagaaggtcatcatctcctgctctggaagcagctccaatattgggaataattatgtatcctggtaccagcagctcccaggaacagcccccaaactcctcatctatgaaaataataagcgaccctcagggattcctgaccgattctctggctccaagtctggcacgtcagccaccctgggcatcaccggactccagactggggacgaggccgattattactgcggaacatgggatagcagcctgaggactgacgtcttcggcggagggaccaagctgatcgtcctaggtcagcccaaggccaaccccactgtcactctgttcccgccctcgagtgaggagcttcaagccaacaaggccacactggtgtgtctcataagtgacttctacccgggagccgtgacagtggcctggaaggcagatagcagccccgtcaaggcgggagtggagaccaccacaccctccaaacaaagcaacaacaagtacgcggccagcagctacctgagcctgacgcctgagcagtggaagtcccacagaagctacagctgccaggtcacgcatgaagggagcaccgtggagaagacagtggcccctacagaatgttcatag

SEQ ID NO: 1184 - DNA, 1410 bp, Artificial Sequence
  Description of Artificial Sequence: Synthetic polynucleotide
atgggatggtcatgtatcatcctttttctagtagcaactgcaaccggtgtacattcccagctgcagctgcaggagtcgggcccaggactggtgaagccttcggagaccctgtccctcacctgcactgtctctggtggctccatcagcagtagtggttactactggggctggattcgccagcccccagggaaggggctggagtggattgggactatctattatggtgggagcacctactacagcccgtccctcaagagtcgagtcaccatatccgtagacacgtccaagaaccagttctccctgaaactgagctctgtgaccgccgcagacacggctgtgtattactgtgcgagccaacagtggctacgagggaactttgactactggggccagggaaccctggtcaccgtctcctcagcgtcgaccaagggcccatcggtcttccccctggcaccctcctccaagagcacctctgggggcacagcggccctgggctgcctggtcaaggactacttccccgaaccagtgacggtgtcgtggaactcaggcgccctgaccagcggcgtgcacaccttcccggctgtcctacagtcctcaggactctactccctcagcagcgtggtgaccgtgccctccagcagcttgggcacccagacctacatctgcaacgtgaatcacaagcccagcaacaccaaggtggacaagaaagttgagcccaaatcttgtgacaaaactcacacatgcccaccgtgcccagcacctgaactcctggggggaccgtcagtcttcctcttccccccaaaacccaaggacaccctcatgatctcccggacccctgaggtcacatgcgtggtggtggacgtgagccacgaagaccctgaggtcaagttcaactggtacgtggacggcgtggaggtgcataatgccaagacaaagccgcgggaggagcagtacaacagcacgtaccgtgtggtcagcgtcctcaccgtcctgcaccaggactggctgaatggcaaggagtacaagtgcaaggtctccaacaaagccctcccagcccccatcgagaaaaccatctccaaagccaaagggcagccccgagaaccacaggtgtacaccctgcccccatcccgggatgagctgaccaagaaccaggtcagcctgacctgcctggtcaaaggcttctatcccagcgacatcgccgtggagtgggagagcaatgggcagccggagaacaactacaagaccacgcctcccgtgctggactccgacggctccttcttcctctacagcaagctcaccgtggacaagagcaggtggcagcaggggaacgtcttctcatgctccgtgctgcatgaggctctgcacagccactacacgcagaagagcctctccctgtctccgggtaaatga

SEQ ID NO: 1185 - DNA, 711 bp, Artificial Sequence
  Description of Artificial Sequence: Synthetic polynucleotide
atgggatggtcatgtatcatcctttttctagtagcaactgcaaccggttcctgggccaattttatgctgactcagccccactctgtgtcggagtctccggggaagacggttaccatctcctgcaccggcagcagtggcagcattgccagcaactatgtgcagtggtaccagcagcgcccgggcagtgcccccaccactgtgatctatgaggataaccaaagaccctctggggtccctgatcggttctctggctccatcgacagctcctccaactctgcctccctcaccatctctggactgaagactgaggacgaggctgactactactgtcagtcttatgatagcagcacctattgggtgttcggcggagggaccaagctgaccgtcctaggtcagcccaaggccaaccccactgtcactctgttcccgccctcgagtgaggagcttcaagccaacaaggccacactggtgtgtctcataagtgacttctacccgggagccgtgacagtggcctggaaggcagatagcagccccgtcaaggcgggagtggagaccaccacaccctccaaacaaagcaacaacaagtacgcggccagcagctacctgagcctgacgcctgagcagtggaagtcccacagaagctacagctgccaggtcacgcatgaagggagcaccgtggagaagacagtggcccctacagaatgttcatag

SEQ ID NO: 1186 - DNA, 1443 bp, Artificial Sequence
  Description of Artificial Sequence: Synthetic polynucleotide
atgggatggtcatgtatcatcctttttctagtagcaactgcaaccggtgtacattccgaggtgcagctggtggagtctgggggaggcatggtacagccgggggggtccctgagactctcctgtgcagcctctggattcacctttaacaactatgccatgaactgggtccgccaggctccagggaaggggctggagtgggtctcagctattagtggtagtgggattaggacatactacgcagagtccgtgaagggccgggtcaccatctccagagacaattccaagagcactctgtatctgcaaatgaacagcctgagagccgaggacacggccgtatattactgtgcgaaagatttgttttacgatttttggagtggtttcgattttgggccgggcgaatcgtttggtatggacgtctggggccaagggaccacggtcaccgtctcctcagcgtcgaccaagggcccatcggtcttccccctggcaccctcctccaagagcacctctgggggcacagcggccctgggctgcctggtcaaggactacttccccgaaccagtgacggtgtcgtggaactcaggcgccctgaccagcggcgtgcacaccttcccggctgtcctacagtcctcaggactctactccctcagcagcgtggtgaccgtgccctccagcagcttgggcacccagacctacatctgcaacgtgaatcacaagcccagcaacaccaaggtggacaagaaagttgagcccaaatcttgtgacaaaactcacacatgcccaccgtgcccagcacctgaactcctggggggaccgtcagtcttcctcttccccccaaaacccaaggacaccctcatgatctcccggacccctgaggtcacatgcgtggtggtggacgtgagccacgaagaccctgaggtcaagttcaactggtacgtggacggcgtggaggtgcataatgccaagacaaagccgcgggaggagcagtacaacagcacgtaccgtgtggtcagcgtcctcaccgtcctgcaccaggactggctgaatggcaaggagtacaagtgcaaggtctccaacaaagccctcccagcccccatcgagaaaaccatctccaaagccaaagggcagccccgagaaccacaggtgtacaccctgcccccatcccgggatgagctgaccaagaaccaggtcagcctgacctgcctggtcaaaggcttctatcccagcgacatcgccgtggagtgggagagcaatgggcagccggagaacaactacaagaccacgcctcccgtgctggactccgacggctccttcttcctctacagcaagctcaccgtggacaagagcaggtggcagcaggggaacgtcttctcatgctccgtgctgcatgaggctctgcacagccactacacgcagaagagcctctccctgtctccgggtaaatga

SEQ ID NO: 1187 - DNA, 704 bp, Artificial Sequence
  Description of Artificial Sequence: Synthetic polynucleotide
atgggatggtcatgtatcatcctttttctagtagcaactgcaaccggtgtacattcagacatccagttgacccagtctccttccaccctgtctgcatctgtaggagacagagtcaacatcacttgccgggtcagtcagagaattactagctggttggcctggtatcagcagaaaccagggaaagcccctaaggtcctgatctctaagacatctagtttagaaggtggggtcccatcaaggttcagcggcagtggatctgggacagaattcactctcaccatcagcagcctgcagcctgatgattttgcaacttattactgccaacagtatagtgagttttcgtacacttttggccaggggaccaagctggagatcaaacgtacggtggctgcaccatctgtcttcatcttcccgccatctgatgagcagttgaaatctggaactgcctctgttgtgtgcctgctgaataacttctaccccagagaagccaaagtgcagtggaaggtggacaacgccctgcagagcggaaacagccaggaaagcgtgacagagcaggattccaaggattccacatacagcctgagcagcacactgacactgtccaaggccgactacgagaagcacaaggtgtacgcctgcgaagtgacacaccagggactgtcctcccctgtgacaaagagcttcaacagaggagaatgctgata

SEQ ID NO: 1188 - DNA, 1443 bp, Artificial Sequence
  Description of Artificial Sequence: Synthetic polynucleotide
atgggatggtcatgtatcatcctttttctagtagcaactgcaaccggtgtacattcccaggtgcagctggtgcagtctggggctgaggtgaagaagcctggggcctcagtgcaggtttcctgccaggcatctgcaaacaccttcaccaaccactatatacactgggtgcgacaggcccctggacaaggacttgagtggatgggaataatctaccctactggtggaaatacaatctacgcacaggggttccagggcagagtcaccatgaccagggacacgtccttgaacacaatctatttggagctgagcagcctgagatctgaggacacggccgtgtattattgtgccagagatgttcgggttgacgattcttggagtggttatgatctcctatccggggggacctactttgactattggggccagggaaccctggtcaccgtctcctcagcgtcgaccaagggcccatcggtcttccccctggcaccctcctccaagagcacctctgggggcacagcggccctgggctgcctggtcaaggactacttccccgaaccagtgacggtgtcgtggaactcaggcgccctgaccagcggcgtgcacaccttcccggctgtcctacagtcctcaggactctactccctcagcagcgtggtgaccgtgccctccagcagcttgggcacccagacctacatctgcaacgtgaatcacaagcccagcaacaccaaggtggacaagaaagttgagcccaaatcttgtgacaaaactcacacatgcccaccgtgcccagcacctgaactcctggggggaccgtcagtcttcctcttccccccaaaacccaaggacaccctcatgatctcccggacccctgaggtcacatgcgtggtggtggacgtgagccacgaagaccctgaggtcaagttcaactggtacgtggacggcgtggaggtgcataatgccaagacaaagccgcgggaggagcagtacaacagcacgtaccgtgtggtcagcgtcctcaccgtcctgcaccaggactggctgaatggcaaggagtacaagtgcaaggtctccaacaaagccctcccagcccccatcgagaaaaccatctccaaagccaaagggcagccccgagaaccacaggtgtacaccctgcccccatcccgggatgagctgaccaagaaccaggtcagcctgacctgcctggtcaaaggcttctatcccagcgacatcgccgtggagtgggagagcaatgggcagccggagaacaactacaagaccacgcctcccgtgctggactccgacggctccttcttcctctacagcaagctcaccgtggacaagagcaggtggcagcaggggaacgtcttctcatgctccgtgctgcatgaggctctgcacagccactacacgcagaagagcctctccctgtctccgggtaaatga

SEQ ID NO: 1189 - DNA, 722 bp, Artificial Sequence
  Description of Artificial Sequence: Synthetic polynucleotide
atgggatggtcatgtatcatcctttttctagtagcaactgcaaccggtgtacattcagacatcgtgatgacccagtctccagactccctggctgtgtctctgggcgagagggccaccatcaactgcaggtccagccagagtgttttatacagctccaacaatgagaactacttagcttggtaccagcagaaaccaggacagcctcctaagttgctcatttactgggcatctacccgggaatccgggatacctgaccgattcagtggcagcgggtctgggacagatttcactctcaccatcagcaggctgcaggctgaagatgtggcagtttattactgtcagcaatattatagtcttcctcgaacgttcggccaagggaccaaggtggaaatcaaacgtacggtggctgcaccatctgtcttcatcttcccgccatctgatgagcagttgaaatctggaactgcctctgttgtgtgcctgctgaataacttctaccccagagaagccaaagtgcagtggaaggtggacaacgccctgcagagcggaaacagccaggaaagcgtgacagagcaggattccaaggattccacatacagcctgagcagcacactgacactgtccaaggccgactacgagaagcacaaggtgtacgcctgcgaagtgacacaccagggactgtcctcccctgtgacaaagagcttcaacagaggagaatgctgata

SEQ ID NO: 1190 - DNA, 1419 bp, Artificial Sequence
  Description of Artificial Sequence: Synthetic polynucleotide
atgggatggtcatgtatcatcctttttctagtagcaactgcaaccggtgtacattccgaggtgcagctggtggagtctgggggaggcttggtacagcctggggggtccctgagactctcctgtgcagcctctggattcaccttcagtagctatagcatgaactgggtccgccaggctccagggaaggggctggagtgggtttcatacattagtagtagtagtagtaccatatactacgcagactctgtgaagggccgattcaccatctccagagacaatgccaagaactcactgtatctgcaaatgaacagcctgagagacgaggacacggctgtgtattactgtgcgagaatggctatagtgggagcttacgccaactggggctttgactactggggccagggaaccctggtcaccgtctcctcagcgtcgaccaagggcccatcggtcttccccctggcaccctcctccaagagcacctctgggggcacagcggccctgggctgcctggtcaaggactacttccccgaaccagtgacggtgtcgtggaactcaggcgccctgaccagcggcgtgcacaccttcccggctgtcctacagtcctcaggactctactccctcagcagcgtggtgaccgtgccctccagcagcttgggcacccagacctacatctgcaacgtgaatcacaagcccagcaacaccaaggtggacaagaaagttgagcccaaatcttgtgacaaaactcacacatgcccaccgtgcccagcacctgaactcctggggggaccgtcagtcttcctcttccccccaaaacccaaggacaccctcatgatctcccggacccctgaggtcacatgcgtggtggtggacgtgagccacgaagaccctgaggtcaagttcaactggtacgtggacggcgtggaggtgcataatgccaagacaaagccgcgggaggagcagtacaacagcacgtaccgtgtggtcagcgtcctcaccgtcctgcaccaggactggctgaatggcaaggagtacaagtgcaaggtctccaacaaagccctcccagcccccatcgagaaaaccatctccaaagccaaagggcagccccgagaaccacaggtgtacaccctgcccccatcccgggatgagctgaccaagaaccaggtcagcctgacctgcctggtcaaaggcttctatcccagcgacatcgccgtggagtgggagagcaatgggcagccggagaacaactacaagaccacgcctcccgtgctggactccgacggctccttcttcctctacagcaagctcaccgtggacaagagcaggtggcagcaggggaacgtcttctcatgctccgtgctgcatgaggctctgcacagccactacacgcagaagagcctctccctgtctccgggtaaatga

SEQ ID NO: 1191 - DNA, 704 bp, Artificial Sequence
  Description of Artificial Sequence: Synthetic polynucleotide
atgggatggtcatgtatcatcctttttctagtagcaactgcaaccggtgtacattcagacatccagatgacccagtctccatcctccctgtctgcatctgtaggagacagagtcaccatcacttgccaggcgagtcaggacattagcaactatttaaattggtatcagcagaaaccagggaaagcccctaagctcctgatctacgatgcatccaatttggaaacaggggtcccatcaaggttcagtggaagtggatctgggacagattttactttcaccatcagcagcctgcagcctgaagatattgcaacatattactgtcaacagtatgataatcccctgatcaccttcggccaagggacacgactggagattaaacgtacggtggctgcaccatctgtcttcatcttcccgccatctgatgagcagttgaaatctggaactgcctctgttgtgtgcctgctgaataacttctaccccagagaagccaaagtgcagtggaaggtggacaacgccctgcagagcggaaacagccaggaaagcgtgacagagcaggattccaaggattccacatacagcctgagcagcacactgacactgtccaaggccgactacgagaagcacaaggtgtacgcctgcgaagtgacacaccagggactgtcctcccctgtgacaaagagcttcaacagaggagaatgctgata

SEQ ID NO: 1192 - DNA, 1422 bp, Artificial Sequence
  Description of Artificial Sequence: Synthetic polynucleotide
atgggatggtcatgtatcatcctttttctagtagcaactgcaaccggtgtacattcccaggtccagctggtacagtctggggctgaggtgaagaagcctggggcctcagtgaaggtctcctgcaaggtttccggatacaccctcattgaattatccatgcactgggtgcgacaggctcctggaaaagggcttgagtggatgggaggttttgatcctgaagatggtgaaacaatctacgcacagaagttccagggcagagtcaccatgaccgaggacacatctacagacacagcctacatggagctgagcagcctgacatctgaggacacggccgtgtattactgtgcaacaacaaccccttttggagtggttaacgccatctggttcgacccctggggccagggaaccctggtcaccgtctcctcagcgtcgaccaagggcccatcggtcttccccctggcaccctcctccaagagcacctctgggggcacagcggccctgggctgcctggtcaaggactacttccccgaacccgtgacggtgtcgtggaactcaggcgccctgaccagcggcgtgcacaccttcccggctgtcctacagtcctcaggactctactccctcagcagcgtggtgaccgtgccctccagcagcttgggcacccagacctacatctgcaacgtgaatcacaagcccagcaacaccaaggtggacaagaaagttgagcccaaatcttgtgacaaaactcacacatgcccaccgtgcccagcacctgaactcctggggggaccgtcagtcttcctcttccccccaaaacccaaggacaccctcatgatctcccggacccctgaggtcacatgcgtggtggtggacgtgagccacgaagaccctgaggtcaagttcaactggtacgtggacggcgtggaggtgcataatgccaagacaaagccgcgggaggagcagtacaacgccacgtaccgtgtggtcagcgtcctcaccgtcctgcaccaggactggctgaatggcaaggagtacaagtgcaaggtctccaacaaagccctcccagcccccatcgcggcaaccatctccaaagccaaagggcagccccgagaaccacaggtgtacaccctgcccccatcccgggatgagctgaccaagaaccaggtcagcctgacctgcctggtcaaaggcttctatcccagcgacatcgccgtggagtgggagagcaatgggcagccggagaacaactacaagaccacgcctcccgtgctggactccgacggctccttcttcctctacagcaagctcaccgtggacaagagcaggtggcagcaggggaacgtcttctcatgctccgtgatgcatgaggctctgcacgcccactacacgcagaagagcctctccctgtctccgggtaaatgatga

SEQ ID NO: 1193 - DNA, 708 bp, Artificial Sequence
  Description of Artificial Sequence: Synthetic polynucleotide
atgggatggtcatgtatcatcctttttctagtagcaactgcaaccggttcctgggcccagtctgtgttgacgcagccgccctcagtgtctgcggccccaggacagaaggtcaccatctcctgctctggaagcagctccaacattgggaataattatgtatcctggtaccagcagctcccaggaacagcccccaaactcctcatctatgaaaataataagcgaccctcagggattcctgaccgattctctggctccaagtctggcacgtcagccaccctggccatcaccggactccagactggggacgaggccgattattgctgcggaacatgggatagcagcctgagtgctggagtgttcggcggagggaccaagctgaccgtcctaggtcagcccaaggccaaccccactgtcactctgttcccgccctcgagtgaggagcttcaagccaacaaggccacactggtgtgtctcataagtgacttctacccgggagccgtgacagtggcctggaaggcagatagcagccccgtcaaggcgggagtggagaccaccacaccctccaaacaaagcaacaacaagtacgcggccagcagctacctgagcctgacgcctgagcagtggaagtcccacagaagctacagctgccaggtcacgcatgaagggagcaccgtggagaagacagtggcccctacagaatgttcatag

SEQ ID NO: 1194 - DNA, 1416 bp, Artificial Sequence
  Description of Artificial Sequence: Synthetic polynucleotide
atgggatggtcatgtatcatcctttttctagtagcaactgcaaccggtgtacattcccaggtccagctggtacagtctggggctgaggtgaagaagcctggggcctcagtgaaggtctcctgcaaggtttccggatacaccctcattgaattatccatgcactgggtgcgacaggctcctggaaaagggcttgagtggatgggaggttttgatcctgaagatggtgaaacaatctacgcacagaagttccagggcagagtcaccatgaccgaggacacatctacagacacagcctacatggagctgagcagcctgagatctgaggacacggccgtgtattactgtgcaacaggcagtccctttggagtggttactagctggttcgacccctggggccagggaaccctggtcaccgtctcctcagcgtcgaccaagggcccatcggtcttccccctggcaccctcctccaagagcacctctgggggcacagcggccctgggctgcctggtcaaggactacttccccgaaccagtgacggtgtcgtggaactcaggcgccctgaccagcggcgtgcacaccttcccggctgtcctacagtcctcaggactctactccctcagcagcgtggtgaccgtgccctccagcagcttgggcacccagacctacatctgcaacgtgaatcacaagcccagcaacaccaaggtggacaagaaagttgagcccaaatcttgtgacaaaactcacacatgcccaccgtgcccagcacctgaactcctggggggaccgtcagtcttcctcttccccccaaaacccaaggacaccctcatgatctcccggacccctgaggtcacatgcgtggtggtggacgtgagccacgaagaccctgaggtcaagttcaactggtacgtggacggcgtggaggtgcataatgccaagacaaagccgcgggaggagcagtacaacagcacgtaccgtgtggtcagcgtcctcaccgtcctgcaccaggactggctgaatggcaaggagtacaagtgcaaggtctccaacaaagccctcccagcccccatcgagaaaaccatctccaaagccaaagggcagccccgagaaccacaggtgtacaccctgcccccatcccgggatgagctgaccaagaaccaggtcagcctgacctgcctggtcaaaggcttctatcccagcgacatcgccgtggagtgggagagcaatgggcagccggagaacaactacaagaccacgcctcccgtgctggactccgacggctccttcttcctctacagcaagctcaccgtggacaagagcaggtggcagcaggggaacgtcttctcatgctccgtgctgcatgaggctctgcacagccactacacgcagaagagcctctccctgtctccgggtaaatga

SEQ ID NO: 1195 - DNA, 711 bp, Artificial Sequence
  Description of Artificial Sequence: Synthetic polynucleotide
atgggatggtcatgtatcatcctttttctagtagcaactgcaaccggttcctgggcccagtctgccctgactcagcctccctccgcgtccgggtctcctggacagtcagtcaccatctcctgcactggaaccagcagtgacgttggtggttataactatgtctcctggtaccaacagcacccgggcaaagcccccaaactcatgatttatgaggtcactaagcggccctcacgggtccctgatcgcttctctgcctccaagtctggcaacacggcctccctgaccgtctctgggctccaggctgaggatgaggctgattattactgcagctcatatgcaggcagcaacaacccttatgtcttcggacctgggaccaaggtcaccgtcctaggtcagcccaaggccaaccccactgtcactctgttcccgccctcgagtgaggagcttcaagccaacaaggccacactggtgtgtctcataagtgacttctacccgggagccgtgacagtggcctggaaggcagatagcagccccgtcaaggcgggagtggagaccaccacaccctccaaacaaagcaacaacaagtacgcggccagcagctacctgagcctgacgcctgagcagtggaagtcccacagaagctacagctgccaggtcacgcatgaagggagcaccgtggagaagacagtggcccctacagaatgttcatag

SEQ ID NO: 1196 - DNA, 1422 bp, Artificial Sequence
  Description of Artificial Sequence: Synthetic polynucleotide
atgggatggtcatgtatcatcctttttctagtagcaactgcaaccggtgtacattcccaggtgcagctggtggagtctgggggaggcgtggtccagcctgggaggtccctgagactctcctgtgcagcgtctggattcaccttcagtagctatggcatgcactgggtccgccaggctccaggcaaggggctggagtgggtggcatttatatggtatgatggaagtaatatatactatacagactccgtgaagggccgcttcaccatctccagagacaattccaagaacacgctgtatctgcaaatgaacagcctgagagccgaggacacggctgtgtattactgtgcgagagatcgagtcgatagcagcagctggggcttttactttgactactggggccagggaaccctggtcaccgtctcctcctcagcgtcgaccaagggcccatcggtcttccccctggcaccctcctccaagagcacctctgggggcacagcggccctgggctgcctggtcaaggactacttccccgaaccagtgacggtgtcgtggaactcaggcgccctgaccagcggcgtgcacaccttcccggctgtcctacagtcctcaggactctactccctcagcagcgtggtgaccgtgccctccagcagcttgggcacccagacctacatctgcaacgtgaatcacaagcccagcaacaccaaggtggacaagaaagttgagcccaaatcttgtgacaaaactcacacatgcccaccgtgcccagcacctgaactcctggggggaccgtcagtcttcctcttccccccaaaacccaaggacaccctcatgatctcccggacccctgaggtcacatgcgtggtggtggacgtgagccacgaagaccctgaggtcaagttcaactggtacgtggacggcgtggaggtgcataatgccaagacaaagccgcgggaggagcagtacaacagcacgtaccgtgtggtcagcgtcctcaccgtcctgcaccaggactggctgaatggcaaggagtacaagtgcaaggtctccaacaaagccctcccagcccccatcgagaaaaccatctccaaagccaaagggcagccccgagaaccacaggtgtacaccctgcccccatcccgggatgagctgaccaagaaccaggtcagcctgacctgcctggtcaaaggcttctatcccagcgacatcgccgtggagtgggagagcaatgggcagccggagaacaactacaagaccacgcctcccgtgctggactccgacggctccttcttcctctacagcaagctcaccgtggacaagagcaggtggcagcaggggaacgtcttctcatgctccgtgctgcatgaggctctgcacagccactacacgcagaagagcctctccctgtctccgggtaaatga

SEQ ID NO: 1197 - DNA, 705 bp, Artificial Sequence
  Description of Artificial Sequence: Synthetic polynucleotide
atgggatggtcatgtatcatcctttttctagtagcaactgcaaccggttcctgggcctcctatgagctgacacagccaccctcggtgtcagtgtccccaggacaaacggccaggatcacctgctctggagatgcattgccaaaaaaatatgcttattggtaccagcagaagtcaggccaggcccctgtgctggtcatctatgaggacagcaaacgaccctccagaatccctgagagattctctggctccagctcagggacaatggccaccttgactatcagtggggcccaggtggaggatgaagctgactactactgttactcaacagacagcagtattaatcatagcggggtattcggcggagggaccaagctgaccgtcctaggtcagcccaaggccaaccccactgtcactctgttcccgccctcgagtgaggagcttcaagccaacaaggccacactggtgtgtctcataagtgacttctacccgggagccgtgacagtggcctggaaggcagatagcagccccgtcaaggcgggagtggagaccaccacaccctccaaacaaagcaacaacaagtacgcggccagcagctacctgagcctgacgcctgagcagtggaagtcccacagaagctacagctgccaggtcacgcatgaagggagcaccgtggagaagacagtggcccctacagaatgttcatag

SEQ ID NO: 1198 - DNA, 1416 bp, Artificial Sequence
  Description of Artificial Sequence: Synthetic polynucleotide
atgggatggtcatgtatcatcctttttctagtagcaactgcaaccggtgtacattcccaggtccagctggtacagtctggggctgaggtgaagaagcctggggcctcagtgaaggtctcctgcaaggtttccggatataccctccctgaattatccatgcactgggtgcgacaggctcctggaaaagggcttgagtggatgggaggttttcatcctgaagatggtgaaacaatctacgcacagaagttccagggcagagtcaccatgaccgaggacacatctacagacacagcctacatggagctgagcagcctgagatctgaggacacggccgtgtattactgtgcaacaggcagtccctttggagtggttactgactggttcgacccctggggccggggaaccctggtcaccgtctcctcagcgtcgaccaagggcccatcggtcttccccctggcaccctcctccaagagcacctctgggggcacagcggccctgggctgcctggtcaaggactacttccccgaaccagtgacggtgtcgtggaactcaggcgccctgaccagcggcgtgcacaccttcccggctgtcctacagtcctcaggactctactccctcagcagcgtggtgaccgtgccctccagcagcttgggcacccagacctacatctgcaacgtgaatcacaagcccagcaacaccaaggtggacaagaaagttgagcccaaatcttgtgacaaaactcacacatgcccaccgtgcccagcacctgaactcctggggggaccgtcagtcttcctcttccccccaaaacccaaggacaccctcatgatctcccggacccctgaggtcacatgcgtggtggtggacgtgagccacgaagaccctgaggtcaagttcaactggtacgtggacggcgtggaggtgcataatgccaagacaaagccgcgggaggagcagtacaacagcacgtaccgtgtggtcagcgtcctcaccgtcctgcaccaggactggctgaatggcaaggagtacaagtgcaaggtctccaacaaagccctcccagcccccatcgagaaaaccatctccaaagccaaagggcagccccgagaaccacaggtgtacaccctgcccccatcccgggatgagctgaccaagaaccaggtcagcctgacctgcctggtcaaaggcttctatcccagcgacatcgccgtggagtgggagagcaatgggcagccggagaacaactacaagaccacgcctcccgtgctggactccgacggctccttcttcctctacagcaagctcaccgtggacaagagcaggtggcagcaggggaacgtcttctcatgctccgtgctgcatgaggctctgcacagccactacacgcagaagagcctctccctgtctccgggtaaatga

SEQ ID NO: 1199 - DNA, 711 bp, Artificial Sequence
  Description of Artificial Sequence: Synthetic polynucleotide
atgggatggtcatgtatcatcctttttctagtagcaactgcaaccggttcctgggcccagtctgccctgactcagcctccctccgcgtccgggtctcctggacagtcagtcaccatctcctgcactggaaccagcagtgacgttggtggttataactatgtctcctggtaccaacaacacccaggcaaagcccccaaactcatgatttatgaggtcagtaagcggccctcaggggtccctgatcgcttctctggctccaagtctggcaacacggcctccctgaccgtctctgggctccaggctgaggatgaggctgattattactgcagctcatatgcaggcagtaacaacccttatgtcttcggaactgggaccaaggtcaccgtcctaggtcagcccaaggccaaccccactgtcactctgttcccgccctcgagtgaggagcttcaagccaacaaggccacactggtgtgtctcataagtgacttctacccgggagccgtgacagtggcctggaaggcagatagcagccccgtcaaggcgggagtggagaccaccacaccctccaaacaaagcaacaacaagtacgcggccagcagctacctgagcctgacgcctgagcagtggaagtcccacagaagctacagctgccaggtcacgcatgaagggagcaccgtggagaagacagtggcccctacagaatgttcatag

SEQ ID NO: 1200 - DNA, 1437 bp, Artificial Sequence
  Description of Artificial Sequence: Synthetic polynucleotide
atgggatggtcatgtatcatcctttttctagtagcaactgcaaccggtgtacattccgaggttcagctggtggagtctggggctgaggtgaagaagcctggggctacagtgaaaatctcctgcaaggtttctggatacaccttcaccgactactacatgcactgggtgcaacaggcccctggaaaagggcttgagtggatgggacttgttgatcctgaagatggtgaaacaatatacgcagagaagttccagggcagagtcaccataaccgcggacacgtctacagacacagcctacatggagctgagcagcctgagatctgaggacacggccgtgtattactgtgcaacatcttcgggtcccagtcggctttgtggtggtggtagctgctaccattcatttgactactggggccagggaaccctggtcaccgtctcctcagcgtcgaccaagggcccatcggtcttccccctggcaccctcctccaagagcacctctgggggcacagcggccctgggctgcctggtcaaggactacttccccgaacccgtgacggtgtcgtggaactcaggcgccctgaccagcggcgtgcacaccttcccggctgtcctacagtcctcaggactctactccctcagcagcgtggtgaccgtgccctccagcagcttgggcacccagacctacatctgcaacgtgaatcacaagcccagcaacaccaaggtggacaagaaagttgagcccaaatcttgtgacaaaactcacacatgcccaccgtgcccagcacctgaactcctggggggaccgtcagtcttcctcttccccccaaaacccaaggacaccctcatgatctcccggacccctgaggtcacatgcgtggtggtggacgtgagccacgaagaccctgaggtcaagttcaactggtacgtggacggcgtggaggtgcataatgccaagacaaagccgcgggaggagcagtacaacgccacgtaccgtgtggtcagcgtcctcaccgtcctgcaccaggactggctgaatggcaaggagtacaagtgcaaggtctccaacaaagccctcccagcccccatcgcggcaaccatctccaaagccaaagggcagccccgagaaccacaggtgtacaccctgcccccatcccgggatgagctgaccaagaaccaggtcagcctgacctgcctggtcaaaggcttctatcccagcgacatcgccgtggagtgggagagcaatgggcagccggagaacaactacaagaccacgcctcccgtgctggactccgacggctccttcttcctctacagcaagctcaccgtggacaagagcaggtggcagcaggggaacgtcttctcatgctccgtgatgcatgaggctctgcacgcccactacacgcagaagagcctctccctgtctccgggtaaatgatga

SEQ ID NO: 1201 - DNA, 710 bp, Artificial Sequence
  Description of Artificial Sequence: Synthetic polynucleotide
atgggatggtcatgtatcatcctttttctagtagcaactgcaaccggtgtacattcagaaattgtgttgacacagtctccaggcaccctgtctttgtctccaggggaaagagccaccctctcctgcagggccagtcagagtgttagcagcagctacttagcctggtaccagcagaaacctggccaggctcccaggctcctcatctatggtgcatccagcagggccactggcatcccagacaggttcagtggcagtgggtctgggacagacttcactctcaccatcagcagactggagcctgaagattttgcagtgtattactgtcagcagtatggtagctcaccgacgtggacgttcggccaagggaccaaggtggaaatcaaacgtacggtggctgcaccatctgtcttcatcttcccgccatctgatgagcagttgaaatctggaactgcctctgttgtgtgcctgctgaataacttctaccccagagaagccaaagtgcagtggaaggtggacaacgccctgcagagcggaaacagccaggaaagcgtgacagagcaggattccaaggattccacatacagcctgagcagcacactgacactgtccaaggccgactacgagaagcacaaggtgtacgcctgcgaagtgacacaccagggactgtcctcccctgtgacaaagagcttcaacagaggagaatgctgata

SEQ ID NO: 1202 - DNA, 1407 bp, Artificial Sequence
  Description of Artificial Sequence: Synthetic polynucleotide
atgggatggtcatgtatcatcctttttctagtagcaactgcaaccggtgtacattccgaagtgcagctggtggagtctgggggagccgtggtacagcctggggggtccctgagactctcctgtgcagcctctggattcacctttgatgcttatactatgcactgggtccgtcaaactccggggcggggtctggagtggctctctcttattagttgggatgggagcacattctatgcagagtctctgaagggccgattcaccgtctccagagacaacagcaaaaactccctgtatttgcaaatgagcagtctgagagctgacgacaccgccttatattactgtgcgaaggctaaagacccgtacactgagtactttgactactggggccagggaaccctggtcaccgtctcctcagcgtcgaccaagggcccatcggtcttccccctggcaccctcctccaagagcacctctgggggcacagcggccctgggctgcctggtcaaggactacttccccgaaccagtgacggtgtcgtggaactcaggcgccctgaccagcggcgtgcacaccttcccggctgtcctacagtcctcaggactctactccctcagcagcgtggtgaccgtgccctccagcagcttgggcacccagacctacatctgcaacgtgaatcacaagcccagcaacaccaaggtggacaagaaagttgagcccaaatcttgtgacaaaactcacacatgcccaccgtgcccagcacctgaactcctggggggaccgtcagtcttcctcttccccccaaaacccaaggacaccctcatgatctcccggacccctgaggtcacatgcgtggtggtggacgtgagccacgaagaccctgaggtcaagttcaactggtacgtggacggcgtggaggtgcataatgccaagacaaagccgcgggaggagcagtacaacagcacgtaccgtgtggtcagcgtcctcaccgtcctgcaccaggactggctgaatggcaaggagtacaagtgcaaggtctccaacaaagccctcccagcccccatcgagaaaaccatctccaaagccaaagggcagccccgagaaccacaggtgtacaccctgcccccatcccgggatgagctgaccaagaaccaggtcagcctgacctgcctggtcaaaggcttctatcccagcgacatcgccgtggagtgggagagcaatgggcagccggagaacaactacaagaccacgcctcccgtgctggactccgacggctccttcttcctctacagcaagctcaccgtggacaagagcaggtggcagcaggggaacgtcttctcatgctccgtgctgcatgaggctctgcacagccactacacgcagaagagcctctccctgtctccgggtaaatga

SEQ ID NO: 1203 - DNA, 704 bp, Artificial Sequence
  Description of Artificial Sequence: Synthetic polynucleotide
atgggatggtcatgtatcatcctttttctagtagcaactgcaaccggtgtacattcagacatccagatgacccagtctccttccaccctgtctgcatctgtaggagacagagtcaccatcacttgccgggccagtcagactattaatagctggttggcctggtatcagatgaaaccagggaaagcccctaaggtcctgatttacaaggcgtctagtttagaaagtggggtcccatcaaggttcagcggcagtggatctgggacagaattcactctcaccatcagcagcctgcagcctgatgactttgcaacttattattgccaacagtattatatttactctctgtctttcggcggtgggaccaaggtggagatcaaacgtacggtggctgcaccatctgtcttcatcttcccgccatctgatgagcagttgaaatctggaactgcctctgttgtgtgcctgctgaataacttctaccccagagaagccaaagtgcagtggaaggtggacaacgccctgcagagcggaaacagccaggaaagcgtgacagagcaggattccaaggattccacatacagcctgagcagcacactgacactgtccaaggccgactacgagaagcacaaggtgtacgcctgcgaagtgacacaccagggactgtcctcccctgtgacaaagagcttcaacagaggagaatgctgata

SEQ ID NO: 1204 - DNA, 1416 bp, Artificial Sequence
  Description of Artificial Sequence: Synthetic polynucleotide
atgggatggtcatgtatcatcctttttctagtagcaactgcaaccggtgtacattccgaggtgcagctggtggagtctggaggaggcttgatccagcctggggggtccctgagactctcctgtgcagcctctgggttcaccgtcagtagcaactacatgagctgggtccgccaggctccagggaaggggctggagtgggtctcagttatttatagcggtggtagcacatactacgcagactccgtgaagggccgatttatcatctccagagacaattccaagaacacgctgtatcttcaaatggacagcctgagagccgaggacacggccgtgtattactgtgcgagaggggacatagtgggagctacttgggaccccgcttttgacatctggggccaagggacactggtcaccgtctcttcagcgtcgaccaagggcccatcggtcttccccctggcaccctcctccaagagcacctctgggggcacagcggccctgggctgcctggtcaaggactacttccccgaaccagtgacggtgtcgtggaactcaggcgccctgaccagcggcgtgcacaccttcccggctgtcctacagtcctcaggactctactccctcagcagcgtggtgaccgtgccctccagcagcttgggcacccagacctacatctgcaacgtgaatcacaagcccagcaacaccaaggtggacaagaaagttgagcccaaatcttgtgacaaaactcacacatgcccaccgtgcccagcacctgaactcctggggggaccgtcagtcttcctcttccccccaaaacccaaggacaccctcatgatctcccggacccctgaggtcacatgcgtggtggtggacgtgagccacgaagaccctgaggtcaagttcaactggtacgtggacggcgtggaggtgcataatgccaagacaaagccgcgggaggagcagtacaacagcacgtaccgtgtggtcagcgtcctcaccgtcctgcaccaggactggctgaatggcaaggagtacaagtgcaaggtctccaacaaagccctcccagcccccatcgagaaaaccatctccaaagccaaagggcagccccgagaaccacaggtgtacaccctgcccccatcccgggatgagctgaccaagaaccaggtcagcctgacctgcctggtcaaaggcttctatcccagcgacatcgccgtggagtgggagagcaatgggcagccggagaacaactacaagaccacgcctcccgtgctggactccgacggctccttcttcctctacagcaagctcaccgtggacaagagcaggtggcagcaggggaacgtcttctcatgctccgtgctgcatgaggctctgcacagccactacacgcagaagagcctctccctgtctccgggtaaatga

SEQ ID NO: 1205 - DNA, 705 bp, Artificial Sequence
  Description of Artificial Sequence: Synthetic polynucleotide
atgggatggtcatgtatcatcctttttctagtagcaactgcaaccggttcctgggcctcctatgtgctgactcagccaccctcagtgtcagtggccccaggaaagacggccaggattacctgtgggggaaacaacattggaagtaaaagtgtgcactggtaccagcagaagccaggccaggcccctgttctggtcatctattatgctagcgcccggccctcaggaatccctgagcgattctctggctccaactctgggaacacggccaccctgaccatcagcagggtcgaagccggggatgaggccgactattactgtcaggtgtgggacactagtagtgatcattctgtggtattcggcggagggaccaagctgaccgtcctaggtcagcccaaggccaaccccactgtcactctgttcccgccctcgagtgaggagcttcaagccaacaaggccacactggtgtgtctcataagtgacttctacccgggagccgtgacagtggcctggaaggcagatagcagccccgtcaaggcgggagtggagaccaccacaccctccaaacaaagcaacaacaagtacgcggccagcagctacctgagcctgacgcctgagcagtggaagtcccacagaagctacagctgccaggtcacgcatgaagggagcaccgtggagaagacagtggcccctacagaatgttcatag

SEQ ID NO: 1206 - DNA, 1419 bp, Artificial Sequence
  Description of Artificial Sequence: Synthetic polynucleotide
atgggatggtcatgtatcatcctttttctagtagcaactgcaaccggtgtacattcccaggtcaccttgagggagtctggtcctgcgctggtgaaacccacacagaccctcacactgacctgcaccttctctgggttctcactcagcactagtggaatgtgtgtgagctggattcgtcagcccccagggaaggccctggagtggcttgcactcattgattgggatgatgataaatactacagcacatctctgaagaccaggctcaccatctccaaggacacctccaaaaaccaggtggtccttacaatgaccaacatggaccctgtggacacagccacgtattactgtgcacggataaatgcgtatagcagcagctggcccacatttgactactggggccagggaaccctggtcaccgtctcctcagcgtcgaccaagggcccatcggtcttccccctggcaccctcctccaagagcacctctgggggcacagcggccctgggctgcctggtcaaggactacttccccgaaccagtgacggtgtcgtggaactcaggcgccctgaccagcggcgtgcacaccttcccggctgtcctacagtcctcaggactctactccctcagcagcgtggtgaccgtgccctccagcagcttgggcacccagacctacatctgcaacgtgaatcacaagcccagcaacaccaaggtggacaagaaagttgagcccaaatcttgtgacaaaactcacacatgcccaccgtgcccagcacctgaactcctggggggaccgtcagtcttcctcttccccccaaaacccaaggacaccctcatgatctcccggacccctgaggtcacatgcgtggtggtggacgtgagccacgaagaccctgaggtcaagttcaactggtacgtggacggcgtggaggtgcataatgccaagacaaagccgcgggaggagcagtacaacagcacgtaccgtgtggtcagcgtcctcaccgtcctgcaccaggactggctgaatggcaaggagtacaagtgcaaggtctccaacaaagccctcccagcccccatcgagaaaaccatctccaaagccaaagggcagccccgagaaccacaggtgtacaccctgcccccatcccgggatgagctgaccaagaaccaggtcagcctgacctgcctggtcaaaggcttctatcccagcgacatcgccgtggagtgggagagcaatgggcagccggagaacaactacaagaccacgcctcccgtgctggactccgacggctccttcttcctctacagcaagctcaccgtggacaagagcaggtggcagcaggggaacgtcttctcatgctccgtgctgcatgaggctctgcacagccactacacgcagaagagcctctccctgtctccgggtaaatga

SEQ ID NO: 1207 - DNA, 707 bp, Artificial Sequence
  Description of Artificial Sequence: Synthetic polynucleotide
atgggatggtcatgtatcatcctttttctagtagcaactgcaaccggtgtacattcagaaattgtgttgacgcagtctccaggcaccctgtctttgtctccaggggaaagagccaccctctcctgcagggccagtcagagtgttagcagcagctacttagcctggtaccagcagaaacctggccaggctcccaggctcctcatctatggtgcatccagcagggccactggcatcccagacaggttcagtggcagtgggtctgggacagacttcactctcaccatcagcagactggagcctgaagattttgcagtgtattactgtcagcagtatggtagctcatcgtggacgttcggccaagggaccaaggtggaaatcaaacgtacggtggctgcaccatctgtcttcatcttcccgccatctgatgagcagttgaaatctggaactgcctctgttgtgtgcctgctgaataacttctaccccagagaagccaaagtgcagtggaaggtggacaacgccctgcagagcggaaacagccaggaaagcgtgacagagcaggattccaaggattccacatacagcctgagcagcacactgacactgtccaaggccgactacgagaagcacaaggtgtacgcctgcgaagtgacacaccagggactgtcctcccctgtgacaaagagcttcaacagaggagaatgctgata

SEQ ID NO: 1208 - DNA, 1419 bp, Artificial Sequence
  Description of Artificial Sequence: Synthetic polynucleotide
atgggatggtcatgtatcatcctttttctagtagcaactgcaaccggtgtacattcccagctgcagctgcaggagtcgggcccaggactggtgaagccttcggagaccctgtccctcacctgcactgtctctggtggctccatcagcagtagtagttactactggggctggattcgccagcccccagggaaggggccggagtggattgggagtatctattatggtgggaccacctattataacccgtccctcaggagtcgagtcaccatatccttagacatgtccaagaaccagatctccctgaagctgagctctgtgaccgccacagacacggctgtgtattactgtgcgaggtcctcatcggggttttcctatgatactcccctcgacccctggggccagggaaccctggtcatcgtctcctcagcgtcgaccaagggcccatcggtcttccccctggcaccctcctccaagagcacctctgggggcacagcggccctgggctgcctggtcaaggactacttccccgaaccagtgacggtgtcgtggaactcaggcgccctgaccagcggcgtgcacaccttcccggctgtcctacagtcctcaggactctactccctcagcagcgtggtgaccgtgccctccagcagcttgggcacccagacctacatctgcaacgtgaatcacaagcccagcaacaccaaggtggacaagaaagttgagcccaaatcttgtgacaaaactcacacatgcccaccgtgcccagcacctgaactcctggggggaccgtcagtcttcctcttccccccaaaacccaaggacaccctcatgatctcccggacccctgaggtcacatgcgtggtggtggacgtgagccacgaagaccctgaggtcaagttcaactggtacgtggacggcgtggaggtgcataatgccaagacaaagccgcgggaggagcagtacaacagcacgtaccgtgtggtcagcgtcctcaccgtcctgcaccaggactggctgaatggcaaggagtacaagtgcaaggtctccaacaaagccctcccagcccccatcgagaaaaccatctccaaagccaaagggcagccccgagaaccacaggtgtacaccctgcccccatcccgggatgagctgaccaagaaccaggtcagcctgacctgcctggtcaaaggcttctatcccagcgacatcgccgtggagtgggagagcaatgggcagccggagaacaactacaagaccacgcctcccgtgctggactccgacggctccttcttcctctacagcaagctcaccgtggacaagagcaggtggcagcaggggaacgtcttctcatgctccgtgctgcatgaggctctgcacagccactacacgcagaagagcctctccctgtctccgggtaaatga

SEQ ID NO: 1209 - DNA, 704 bp, Artificial Sequence
  Description of Artificial Sequence: Synthetic polynucleotide
atgggatggtcatgtatcatcctttttctagtagcaactgcaaccggtgtacattcagacatccagatgacccagtctccatcctccctgtctgcatctgtaggagacagagtcaccatcacttgccgggcaagtcagggcattagaaatgatttaggctggtttcagcagaaaccagggaaagcccctaagcgcctgatctatgctgcatccagtttgcaaagtggggtcccatcaaggttcagcggcagtggatctgggacagaattcactctcacaatcagcagcctgcagcctgaagattttgcaacttattactgtctacagcataatagttaccccatcaccttcggccaagggacacgactggagattaaacgtacggtggctgcaccatctgtcttcatcttcccgccatctgatgagcagttgaaatctggaactgcctctgttgtgtgcctgctgaataacttctaccccagagaagccaaagtgcagtggaaggtggacaacgccctgcagagcggaaacagccaggaaagcgtgacagagcaggattccaaggattccacatacagcctgagcagcacactgacactgtccaaggccgactacgagaagcacaaggtgtacgcctgcgaagtgacacaccagggactgtcctcccctgtgacaaagagcttcaacagaggagaatgctgata

SEQ ID NO: 1210 - DNA, 1419 bp, Artificial Sequence
  Description of Artificial Sequence: Synthetic polynucleotide
atgggatggtcatgtatcatcctttttctagtagcaactgcaaccggtgtacattccgaggttcagctggtggagtctgggactgaggtgaagaagcctggggcctcagtgaaggtctcctgcaagacatctggatacatattcaccaactactatatccactgggtgcgacaggcccctggacaagggcttgagtggatgggcatattcaaccctaatggtggcggcacaagctacgcacagaagttccagggcagaatcaccttgaccggcaacacgtccgcgaatacaggctatatggtattgaggagcctgacatctgaggacacggccgtttattattgtgcgagagatccacgcacttcgggtgacaatgatggttttgatatgtggggccaggggacaaaggtcaccgtctcttcagcgtcgaccaagggcccatcggtcttccccctggcaccctcctccaagagcacctctgggggcacagcggccctgggctgcctggtcaaggactacttccccgaacccgtgacggtgtcgtggaactcaggcgccctgaccagcggcgtgcacaccttcccggctgtcctacagtcctcaggactctactccctcagcagcgtggtgaccgtgccctccagcagcttgggcacccagacctacatctgcaacgtgaatcacaagcccagcaacaccaaggtggacaagaaagttgagcccaaatcttgtgacaaaactcacacatgcccaccgtgcccagcacctgaactcctggggggaccgtcagtcttcctcttccccccaaaacccaaggacaccctcatgatctcccggacccctgaggtcacatgcgtggtggtggacgtgagccacgaagaccctgaggtcaagttcaactggtacgtggacggcgtggaggtgcataatgccaagacaaagccgcgggaggagcagtacaacgccacgtaccgtgtggtcagcgtcctcaccgtcctgcaccaggactggctgaatggcaaggagtacaagtgcaaggtctccaacaaagccctcccagcccccatcgcggcaaccatctccaaagccaaagggcagccccgagaaccacaggtgtacaccctgcccccatcccgggatgagctgaccaagaaccaggtcagcctgacctgcctggtcaaaggcttctatcccagcgacatcgccgtggagtgggagagcaatgggcagccggagaacaactacaagaccacgcctcccgtgctggactccgacggctccttcttcctctacagcaagctcaccgtggacaagagcaggtggcagcaggggaacgtcttctcatgctccgtgatgcatgaggctctgcacgcccactacacgcagaagagcctctccctgtctccgggtaaatgatga

SEQ ID NO: 1211 - DNA, 710 bp, Artificial Sequence
  Description of Artificial Sequence: Synthetic polynucleotide
atgggatggtcatgtatcatcctttttctagtagcaactgcaaccggtgtacattcagtgctgactcagtctccagccaccctgtctttgtctccaggggaaagagccaccctctcctgcagggccagtcagagtcttagcagttacaattacttagcctggtaccaacagaaacctggccaggctcccaggctcctcatttatgctgcatccaagagggccactggcatcccagccaggttcagtggcagtgggtctgggacagacttcactctcaccatcagcagcctagagcctgaagattttgcagtttatttctgtcagcagcgcagcaacaggcctccggcgtggacgttcggccaagggaccaaggtggaaatcaaacgtacggtggctgcaccatctgtcttcatcttcccgccatctgatgagcagttgaaatctggaactgcctctgttgtgtgcctgctgaataacttctaccccagagaagccaaagtgcagtggaaggtggacaacgccctgcagagcggaaacagccaggaaagcgtgacagagcaggattccaaggattccacatacagcctgagcagcacactgacactgtccaaggccgactacgagaagcacaaggtgtacgcctgcgaagtgacacaccagggactgtcctcccctgtgacaaagagcttcaacagaggagaatgctgata

SEQ ID NO: 1212 - DNA, 1449 bp, Artificial Sequence
  Description of Artificial Sequence: Synthetic polynucleotide
atgggatggtcatgtatcatcctttttctagtagcaactgcaaccggtgtacattcccaggtgcagctggtacagtctgggggaggcgtggtccagcctgggaggtccctgagactctcctgtgcagcctctggattcaacttcggcgactttggcatgcattgggtccgccaggctccaggcaaggggctggagtgggtggcagttatatcatatgagggaaggaataaaaatcatgcagactccgtgaggggccgattcaccatctccagagacaattcgaggaacatgctgtatcttcagatgaacagcctgagacgtggggacacggcagtgtattactgtgcgaaagaaaacagagatagaaattacgattcttggagtgcctcttatagtgactactactacggtatggacgtctggggccaagggaccacggtcaccgtctcctcagcgtcgaccaagggcccatcggtcttccccctggcaccctcctccaagagcacctctgggggcacagcggccctgggctgcctggtcaaggactacttccccgaacccgtgacggtgtcgtggaactcaggcgccctgaccagcggcgtgcacaccttcccggctgtcctacagtcctcaggactctactccctcagcagcgtggtgaccgtgccctccagcagcttgggcacccagacctacatctgcaacgtgaatcacaagcccagcaacaccaaggtggacaagaaagttgagcccaaatcttgtgacaaaactcacacatgcccaccgtgcccagcacctgaactcctggggggaccgtcagtcttcctcttccccccaaaacccaaggacaccctcatgatctcccggacccctgaggtcacatgcgtggtggtggacgtgagccacgaagaccctgaggtcaagttcaactggtacgtggacggcgtggaggtgcataatgccaagacaaagccgcgggaggagcagtacaacgccacgtaccgtgtggtcagcgtcctcaccgtcctgcaccaggactggctgaatggcaaggagtacaagtgcaaggtctccaacaaagccctcccagcccccatcgcggcaaccatctccaaagccaaagggcagccccgagaaccacaggtgtacaccctgcccccatcccgggatgagctgaccaagaaccaggtcagcctgacctgcctggtcaaaggcttctatcccagcgacatcgccgtggagtgggagagcaatgggcagccggagaacaactacaagaccacgcctcccgtgctggactccgacggctccttcttcctctacagcaagctcaccgtggacaagagcaggtggcagcaggggaacgtcttctcatgctccgtgatgcatgaggctctgcacgcccactacacgcagaagagcctctccctgtctccgggtaaatgatga

SEQ ID NO: 1213 - DNA, 707 bp, Artificial Sequence
  Description of Artificial Sequence: Synthetic polynucleotide
atgggatggtcatgtatcatcctttttctagtagcaactgcaaccggtgtacattcagacatcgtgatgacccagtctccatccttcctgtctgcatctgtaggagacagagtcaccatcacttgccgggccagtcagggcattgacaggtatttagcctggtatcagcaaaaaccagggagtgcccctaaactcctcatctatgctgcatccactttgcaaagtggggtcccatcaaggttcagcggcagtggatctgagacagacttcactctcacaatcagcagcctgcagcctgacgattttgcaacttattactgtcaacagctcagtacttaccccacgatcaccttcggccaagggacacgactggagattaaacgtacggtggctgcaccatctgtcttcatcttcccgccatctgatgagcagttgaaatctggaactgcctctgttgtgtgcctgctgaataacttctaccccagagaagccaaagtgcagtggaaggtggacaacgccctgcagagcggaaacagccaggaaagcgtgacagagcaggattccaaggattccacatacagcctgagcagcacactgacactgtccaaggccgactacgagaagcacaaggtgtacgcctgcgaagtgacacaccagggactgtcctcccctgtgacaaagagcttcaacagaggagaatgctgata

SEQ ID NO: 1214 - protein, 467 aa, Artificial Sequence
  Description of Artificial Sequence: Synthetic polypeptide
MGWSCIILFLVATATGVHSQVQLQESGPGLVKPSQTLSLTCTVSGGSISRAGYYWSWIRQHPGKGLEWIGYIFYSGSTYYNPSLKSRVTISEDTSKNQFSLKLSSVTAADTAVYYCASSGRLTIYYWGQGTLVTVSSASTKGPSVFPLAPSSKSTSGGTAALGCLVKDYFPEPVTVSWNSGALTSGVHTFPAVLQSSGLYSLSSVVTVPSSSLGTQTYICNVNHKPSNTKVDKKVEPKSCDKTHTCPPCPAPELLGGPSVFLFPPKPKDTLMISRTPEVTCVVVDVSHEDPEVKFNWYVDGVEVHNAKTKPREEQYNSTYRVVSVLTVLHQDWLNGKEYKCKVSNKALPAPIEKTISKAKGQPREPQVYTLPPSRDELTKNQVSLTCLVKGFYPSDIAVEWESNGQPENNYKTTPPVLDSDGSFFLYSKLTVDKSRWQQGNVFSCSVLHEALHSHYTQKSLSLSPGK

SEQ ID NO: 1215 - protein, 118 aa, Artificial Sequence
  Description of Artificial Sequence: Synthetic polypeptide
QVQLQESGPGLVKPSQTLSLTCTVSGGSISRAGYYWSWIRQHPGKGLEWIGYIFYSGSTYYNPSLKSRVTISEDTSKNQFSLKLSSVTAADTAVYYCASSGRLTIYYWGQGTLVTVSS

SEQ ID NO: 1216 - protein, 471 aa, Artificial Sequence
  Description of Artificial Sequence: Synthetic polypeptide
MGWSCIILFLVATATGVHSQVQLVQSGAEVKKPGSSVKVSCKASEDTFSTYAINWVRQAPGQGLEWMGRIIPFFGIANYAQKFQDRVTMTADKFTSTAYMELSSLRSEDTAVYYCARSWVQGVSTYPFDYWGQGTLVTVSSASTKGPSVFPLAPSSKSTSGGTAALGCLVKDYFPEPVTVSWNSGALTSGVHTFPAVLQSSGLYSLSSVVTVPSSSLGTQTYICNVNHKPSNTKVDKKVEPKSCDKTHTCPPCPAPELLGGPSVFLFPPKPKDTLMISRTPEVTCVVVDVSHEDPEVKFNWYVDGVEVHNAKTKPREEQYNSTYRVVSVLTVLHQDWLNGKEYKCKVSNKALPAPIEKTISKAKGQPREPQVYTLPPSRDELTKNQVSLTCLVKGFYPSDIAVEWESNGQPENNYKTTPPVLDSDGSFFLYSKLTVDKSRWQQGNVFSCSVLHEALHSHYTQKSLSLSPGK

SEQ ID NO: 1217 - protein, 122 aa, Artificial Sequence
  Description of Artificial Sequence: Synthetic polypeptide
QVQLVQSGAEVKKPGSSVKVSCKASEDTFSTYAINWVRQAPGQGLEWMGRIIPFFGIANYAQKFQDRVTMTADKFTSTAYMELSSLRSEDTAVYYCARSWVQGVSTYPFDYWGQGTLVTVSS

SEQ ID NO: 1218 - protein, 472 aa, Artificial Sequence
  Description of Artificial Sequence: Synthetic polypeptide
MGWSCIILFLVATATGVHSQVQLVQSGAEVKKPGSSVKVSCKASGGTLSSYAISWVRQAPGQGLEWMGRIIPIFGIPNYAQKFQGRVTITADKSTNTAYMELSSLRSEDTAVYYCARDVPGGIQLWSWFDSWGQGTLVTVSSASTKGPSVFPLAPSSKSTSGGTAALGCLVKDYFPEPVTVSWNSGALTSGVHTFPAVLQSSGLYSLSSVVTVPSSSLGTQTYICNVNHKPSNTKVDKKVEPKSCDKTHTCPPCPAPELLGGPSVFLFPPKPKDTLMISRTPEVTCVVVDVSHEDPEVKFNWYVDGVEVHNAKTKPREEQYNSTYRVVSVLTVLHQDWLNGKEYKCKVSNKALPAPIEKTISKAKGQPREPQVYTLPPSRDELTKNQVSLTCLVKGFYPSDIAVEWESNGQPENNYKTTPPVLDSDGSFFLYSKLTVDKSRWQQGNVFSCSVLHEALHSHYTQKSLSLSPGK

SEQ ID NO: 1219 - protein, 123 aa, Artificial Sequence
  Description of Artificial Sequence: Synthetic polypeptide
QVQLVQSGAEVKKPGSSVKVSCKASGGTLSSYAISWVRQAPGQGLEWMGRIIPIFGIPNYAQKFQGRVTITADKSTNTAYMELSSLRSEDTAVYYCARDVPGGIQLWSWFDSWGQGTLVTVSS

SEQ ID NO: 1220 - protein, 467 aa, Artificial Sequence
  Description of Artificial Sequence: Synthetic polypeptide
MGWSCIILFLVATATGVHSQVQLQESGPGLVKPSQTLSLTCTVSGGSITSGGYSWSWIRQHPGKGLEWIGSMSYSGSTYYNPSLKSRVTISVDTSKNQFSLNLSSVTAADTAVYYCASSGRITIYYWGQGTLITVSSASTKGPSVFPLAPSSKSTSGGTAALGCLVKDYFPEPVTVSWNSGALTSGVHTFPAVLQSSGLYSLSSVVTVPSSSLGTQTYICNVNHKPSNTKVDKKVEPKSCDKTHTCPPCPAPELLGGPSVFLFPPKPKDTLMISRTPEVTCVVVDVSHEDPEVKFNWYVDGVEVHNAKTKPREEQYNSTYRVVSVLTVLHQDWLNGKEYKCKVSNKALPAPIEKTISKAKGQPREPQVYTLPPSRDELTKNQVSLTCLVKGFYPSDIAVEWESNGQPENNYKTTPPVLDSDGSFFLYSKLTVDKSRWQQGNVFSCSVLHEALHSHYTQKSLSLSPGK

SEQ ID NO: 1221 - protein, 118 aa, Artificial Sequence
  Description of Artificial Sequence: Synthetic polypeptide
QVQLQESGPGLVKPSQTLSLTCTVSGGSITSGGYSWSWIRQHPGKGLEWIGSMSYSGSTYYNPSLKSRVTISVDTSKNQFSLNLSSVTAADTAVYYCASSGRITIYYWGQGTLITVSS

SEQ ID NO: 1222 - protein, 468 aa, Artificial Sequence
  Description of Artificial Sequence: Synthetic polypeptide
MGWSCIILFLVATATGVHSEVQLVESGGGLVQPGGSLRLSCAASGFTVSSNYIAWVRQAPGKGLEWVSIIFSGNNSYYADSVKGRFSISRDNSKNTVFLQMNSLRAEDTAVYYCARGRWLVGYGMDVWGQGTTVTVSSASTKGPSVFPLAPSSKSTSGGTAALGCLVKDYFPEPVTVSWNSGALTSGVHTFPAVLQSSGLYSLSSVVTVPSSSLGTQTYICNVNHKPSNTKVDKKVEPKSCDKTHTCPPCPAPELLGGPSVFLFPPKPKDTLMISRTPEVTCVVVDVSHEDPEVKFNWYVDGVEVHNAKTKPREEQYNSTYRVVSVLTVLHQDWLNGKEYKCKVSNKALPAPIEKTISKAKGQPREPQVYTLPPSRDELTKNQVSLTCLVKGFYPSDIAVEWESNGQPENNYKTTPPVLDSDGSFFLYSKLTVDKSRWQQGNVFSCSVLHEALHSHYTQKSLSLSPGK

SEQ ID NO: 1223 - protein, 119 aa, Artificial Sequence
  Description of Artificial Sequence: Synthetic polypeptide
EVQLVESGGGLVQPGGSLRLSCAASGFTVSSNYIAWVRQAPGKGLEWVSIIFSGNNSYYADSVKGRFSISRDNSKNTVFLQMNSLRAEDTAVYYCARGRWLVGYGMDVWGQGTTVTVSS

SEQ ID NO: 1224 - protein, 469 aa, Artificial Sequence
  Description of Artificial Sequence: Synthetic polypeptide
MGWSCIILFLVATATGVHSQVQLVQSGAEVKKPGSSVKVSCKASGGTFSSYSISWVRQAPGQGLEWMGRIIPMFGTVSNVQKFQGRVTITADKSTSTAYMELSSLRSEDTAVYYCATGAVGATILVDYWGQGTLVTVSSASTKGPSVFPLAPSSKSTSGGTAALGCLVKDYFPEPVTVSWNSGALTSGVHTFPAVLQSSGLYSLSSVVTVPSSSLGTQTYICNVNHKPSNTKVDKKVEPKSCDKTHTCPPCPAPELLGGPSVFLFPPKPKDTLMISRTPEVTCVVVDVSHEDPEVKFNWYVDGVEVHNAKTKPREEQYNSTYRVVSVLTVLHQDWLNGKEYKCKVSNKALPAPIEKTISKAKGQPREPQVYTLPPSRDELTKNQVSLTCLVKGFYPSDIAVEWESNGQPENNYKTTPPVLDSDGSFFLYSKLTVDKSRWQQGNVFSCSVLHEALHSHYTQKSLSLSPGK

SEQ ID NO: 1225 - protein, 120 aa, Artificial Sequence
  Description of Artificial Sequence: Synthetic polypeptide
QVQLVQSGAEVKKPGSSVKVSCKASGGTFSSYSISWVRQAPGQGLEWMGRIIPMFGTVSNVQKFQGRVTITADKSTSTAYMELSSLRSEDTAVYYCATGAVGATILVDYWGQGTLVTVSS

SEQ ID NO: 1226 - protein, 239 aa, Artificial Sequence
  Description of Artificial Sequence: Synthetic polypeptide
MGWSCIILFLVATATGVHSDIVMTQTPLSSPVTLGQPASISCRSSQSLVHSDGNTYLSWLQQRPGQPPRLLIYKISNRFSGVPDRFSGSGAGTDFTLKISRVEAEDVGVYYCMQGTQFPQVTFGQGTRLEIKRTVAAPSVFIFPPSDEQLKSGTASVVCLLNNFYPREAKVQWKVDNALQSGNSQESVTEQDSKDSTYSLSSTLTLSKADYEKHKVYACEVTHQGLSSPVTKSFNRGEC

SEQ ID NO: 1227 - protein, 113 aa, Artificial Sequence
  Description of Artificial Sequence: Synthetic polypeptide
DIVMTQTPLSSPVTLGQPASISCRSSQSLVHSDGNTYLSWLQQRPGQPPRLLIYKISNRFSGVPDRFSGSGAGTDFTLKISRVEAEDVGVYYCMQGTQFPQVTFGQGTRLEIK

SEQ ID NO: 1228 - protein, 233 aa, Artificial Sequence
  Description of Artificial Sequence: Synthetic polypeptide
MGWSCIILFLVATATGVHSDIQMTQSPSSLSASVRDRVTITCRASQNISNYLNWYQQRPGKAPKFLIYAASSLQSGVPSRFSGSGSGTDFTLTISSLQPEDFATYYCQQSYNSPRTFGQGTKVEIKRTVAAPSVFIFPPSDEQLKSGTASVVCLLNNFYPREAKVQWKVDNALQSGNSQESVTEQDSKDSTYSLSSTLTLSKADYEKHKVYACEVTHQGLSSPVTKSFNRGEC

SEQ ID NO: 1229 - protein, 107 aa, Artificial Sequence
  Description of Artificial Sequence: Synthetic polypeptide
DIQMTQSPSSLSASVRDRVTITCRASQNISNYLNWYQQRPGKAPKFLIYAASSLQSGVPSRFSGSGSGTDFTLTISSLQPEDFATYYCQQSYNSPRTFGQGTKVEIK

SEQ ID NO: 1230 - protein, 233 aa, Artificial Sequence
  Description of Artificial Sequence: Synthetic polypeptide
MGWSCIILFLVATATGVHSEIVMTQSPAPLSVSPGERATLSCRANQSISSNLAWYQQKPGQAPRLLIYGASTRATGIPARFSGSGSGTEFTLTISSLQSEDFAVYYCQQFNNWPRTFGQGTKVEIKRTVAAPSVFIFPPSDEQLKSGTASVVCLLNNFYPREAKVQWKVDNALQSGNSQESVTEQDSKDSTYSLSSTLTLSKADYEKHKVYACEVTHQGLSSPVTKSFNRGEC

SEQ ID NO: 1231 - protein, 107 aa, Artificial Sequence
  Description of Artificial Sequence: Synthetic polypeptide
EIVMTQSPAPLSVSPGERATLSCRANQSISSNLAWYQQKPGQAPRLLIYGASTRATGIPARFSGSGSGTEFTLTISSLQSEDFAVYYCQQFNNWPRTFGQGTKVEIK

SEQ ID NO: 1232 - protein, 239 aa, Artificial Sequence
  Description of Artificial Sequence: Synthetic polypeptide
MGWSCIILFLVATATGVHSDIVMTQTPLSSPVTLGQPASISCRSSQSLVSSDGNTYLSWLQQRPGQPPRLLIYKISNRFSGVPDRFSGSGAGTDFTLKISRVEAEDVGVYYCMQATQFPLITFGQGTRLEIKRTVAAPSVFIFPPSDEQLKSGTASVVCLLNNFYPREAKVQWKVDNALQSGNSQESVTEQDSKDSTYSLSSTLTLSKADYEKHKVYACEVTHQGLSSPVTKSFNRGEC

SEQ ID NO: 1233 - protein, 113 aa, Artificial Sequence
  Description of Artificial Sequence: Synthetic polypeptide
DIVMTQTPLSSPVTLGQPASISCRSSQSLVSSDGNTYLSWLQQRPGQPPRLLIYKISNRFSGVPDRFSGSGAGTDFTLKISRVEAEDVGVYYCMQATQFPLITFGQGTRLEIK

SEQ ID NO: 1234 - protein, 233 aa, Artificial Sequence
  Description of Artificial Sequence: Synthetic polypeptide
MGWSCIILFLVATATGVHSEIVLTQSPGTLSLSPGDRATLSCRASQSVTSSFLAWYQQKPGQAPRLLIYGASTRATGIPDRFSGSGSGTDFTLTISRLEPEDFAVFYCQQYGSSLTFGQGTRLEIKRTVAAPSVFIFPPSDEQLKSGTASVVCLLNNFYPREAKVQWKVDNALQSGNSQESVTEQDSKDSTYSLSSTLTLSKADYEKHKVYACEVTHQGLSSPVTKSFNRGEC

SEQ ID NO: 1235 - protein, 107 aa, Artificial Sequence
  Description of Artificial Sequence: Synthetic polypeptide
EIVLTQSPGTLSLSPGDRATLSCRASQSVTSSFLAWYQQKPGQAPRLLIYGASTRATGIPDRFSGSGSGTDFTLTISRLEPEDFAVFYCQQYGSSLTFGQGTRLEIK

SEQ ID NO: 1236 - protein, 238 aa, Artificial Sequence
  Description of Artificial Sequence: Synthetic polypeptide
MGWSCIILFLVATATGVHSDVVMTQSPLSLPVTLGQPASISCRSNQSLVFSDGNTYLNWFQQRPGQSPRRLIYKVSNWDSGVPDRFSGSGSGTDFTLKISRVEAEDVGVYYCMQGTHWPPTFGQGTRLEIKRTVAAPSVFIFPPSDEQLKSGTASVVCLLNNFYPREAKVQWKVDNALQSGNSQESVTEQDSKDSTYSLSSTLTLSKADYEKHKVYACEVTHQGLSSPVTKSFNRGEC

SEQ ID NO: 1237 - protein, 112 aa, Artificial Sequence
  Description of Artificial Sequence: Synthetic polypeptide
DVVMTQSPLSLPVTLGQPASISCRSNQSLVFSDGNTYLNWFQQRPGQSPRRLIYKVSNWDSGVPDRFSGSGSGTDFTLKISRVEAEDVGVYYCMQGTHWPPTFGQGTRLEIK

SEQ ID NO: 1238 - DNA, 1404 bp, Artificial Sequence
  Description of Artificial Sequence: Synthetic polynucleotide
atgggatggtcatgtatcatcctttttctagtagcaactgcaaccggtgtacattcccaggtgcagctgcaggagtcgggcccaggactggtgaagccttcacagaccctgtccctcacctgcactgtctctggaggctccatcagccgtgctggttactactggagctggatccgccagcacccagggaagggcctggagtggattgggtacatcttttacagtgggagcacctactacaacccgtccctcaagagtcgagttaccatatcagaagacacgtctaagaaccagttctccctgaagctgagctctgtgactgccgcggacacggccgtgtattactgtgcctcttcgggccgacttactatttactactggggccagggaaccctggtcaccgtctcctcagcgtcgaccaagggcccatcggtcttccccctggcaccctcctccaagagcacctctgggggcacagcggccctgggctgcctggtcaaggactacttccccgaaccagtgacggtgtcgtggaactcaggcgccctgaccagcggcgtgcacaccttcccggctgtcctacagtcctcaggactctactccctcagcagcgtggtgaccgtgccctccagcagcttgggcacccagacctacatctgcaacgtgaatcacaagcccagcaacaccaaggtggacaagaaagttgagcccaaatcttgtgacaaaactcacacatgcccaccgtgcccagcacctgaactcctggggggaccgtcagtcttcctcttccccccaaaacccaaggacaccctcatgatctcccggacccctgaggtcacatgcgtggtggtggacgtgagccacgaagaccctgaggtcaagttcaactggtacgtggacggcgtggaggtgcataatgccaagacaaagccgcgggaggagcagtacaacagcacgtaccgtgtggtcagcgtcctcaccgtcctgcaccaggactggctgaatggcaaggagtacaagtgcaaggtctccaacaaagccctcccagcccccatcgagaaaaccatctccaaagccaaagggcagccccgagaaccacaggtgtacaccctgcccccatcccgggatgagctgaccaagaaccaggtcagcctgacctgcctggtcaaaggcttctatcccagcgacatcgccgtggagtgggagagcaatgggcagccggagaacaactacaagaccacgcctcccgtgctggactccgacggctccttcttcctctacagcaagctcaccgtggacaagagcaggtggcagcaggggaacgtcttctcatgctccgtgctgcatgaggctctgcacagccactacacgcagaagagcctctccctgtctccgggtaaatga

SEQ ID NO: 1239 - DNA, 1416 bp, Artificial Sequence
  Description of Artificial Sequence: Synthetic polynucleotide
atgggatggtcatgtatcatcctttttctagtagcaactgcaaccggtgtacattcccaggtgcagctggtgcagtctggggctgaggtgaagaagcctgggtcctcggtgaaggtctcctgcaaggcttctgaagacaccttcagcacctatgctatcaactgggtgcgacaggcccctggacaagggcttgagtggatgggaaggatcatccctttttttggtattgcaaactacgcacagaagttccaggacagagtcacgatgaccgcggacaaattcacgagcacagcctacatggagctgagcagcctgagatctgaggacacggccgtgtattactgtgcgagatcctgggttcagggagttagtacatatccctttgactactggggccagggaaccctggtcaccgtctcctcagcgtcgaccaagggcccatcggtcttccccctggcaccctcctccaagagcacctctgggggcacagcggccctgggctgcctggtcaaggactacttccccgaaccagtgacggtgtcgtggaactcaggcgccctgaccagcggcgtgcacaccttcccggctgtcctacagtcctcaggactctactccctcagcagcgtggtgaccgtgccctccagcagcttgggcacccagacctacatctgcaacgtgaatcacaagcccagcaacaccaaggtggacaagaaagttgagcccaaatcttgtgacaaaactcacacatgcccaccgtgcccagcacctgaactcctggggggaccgtcagtcttcctcttccccccaaaacccaaggacaccctcatgatctcccggacccctgaggtcacatgcgtggtggtggacgtgagccacgaagaccctgaggtcaagttcaactggtacgtggacggcgtggaggtgcataatgccaagacaaagccgcgggaggagcagtacaacagcacgtaccgtgtggtcagcgtcctcaccgtcctgcaccaggactggctgaatggcaaggagtacaagtgcaaggtctccaacaaagccctcccagcccccatcgagaaaaccatctccaaagccaaagggcagccccgagaaccacaggtgtacaccctgcccccatcccgggatgagctgaccaagaaccaggtcagcctgacctgcctggtcaaaggcttctatcccagcgacatcgccgtggagtgggagagcaatgggcagccggagaacaactacaagaccacgcctcccgtgctggactccgacggctccttcttcctctacagcaagctcaccgtggacaagagcaggtggcagcaggggaacgtcttctcatgctccgtgctgcatgaggctctgcacagccactacacgcagaagagcctctccctgtctccgggtaaatga

SEQ ID NO: 1240 - DNA, 1419 bp, Artificial Sequence
  Description of Artificial Sequence: Synthetic polynucleotide
atgggatggtcatgtatcatcctttttctagtagcaactgcaaccggtgtacattcccaggtgcagctggtgcagtctggggctgaggtgaagaagcctgggtcctcggtgaaggtctcctgcaaggcttctggaggcaccctcagcagctatgctatcagctgggtgcgacaggcccctggacaagggcttgagtggatgggaaggatcatccctatctttggtataccaaattatgcacagaagttccagggcagagtcacgattaccgcggacaaatccacgaacacagcctacatggagctgagcagcctgagatctgaggacacggccgtgtattactgtgcgagagacgttcccggggggatacaactatggagctggttcgactcctggggccagggaaccctggtcaccgtctcctcagcgtcgaccaagggcccatcggtcttccccctggcaccctcctccaagagcacctctgggggcacagcggccctgggctgcctggtcaaggactacttccccgaaccagtgacggtgtcgtggaactcaggcgccctgaccagcggcgtgcacaccttcccggctgtcctacagtcctcaggactctactccctcagcagcgtggtgaccgtgccctccagcagcttgggcacccagacctacatctgcaacgtgaatcacaagcccagcaacaccaaggtggacaagaaagttgagcccaaatcttgtgacaaaactcacacatgcccaccgtgcccagcacctgaactcctggggggaccgtcagtcttcctcttccccccaaaacccaaggacaccctcatgatctcccggacccctgaggtcacatgcgtggtggtggacgtgagccacgaagaccctgaggtcaagttcaactggtacgtggacggcgtggaggtgcataatgccaagacaaagccgcgggaggagcagtacaacagcacgtaccgtgtggtcagcgtcctcaccgtcctgcaccaggactggctgaatggcaaggagtacaagtgcaaggtctccaacaaagccctcccagcccccatcgagaaaaccatctccaaagccaaagggcagccccgagaaccacaggtgtacaccctgcccccatcccgggatgagctgaccaagaaccaggtcagcctgacctgcctggtcaaaggcttctatcccagcgacatcgccgtggagtgggagagcaatgggcagccggagaacaactacaagaccacgcctcccgtgctggactccgacggctccttcttcctctacagcaagctcaccgtggacaagagcaggtggcagcaggggaacgtcttctcatgctccgtgctgcatgaggctctgcacagccactacacgcagaagagcctctccctgtctccgggtaaatga

SEQ ID NO: 1241 - DNA, 1404 bp, Artificial Sequence
  Description of Artificial Sequence: Synthetic polynucleotide
atgggatggtcatgtatcatcctttttctagtagcaactgcaaccggtgtacattcccaggtgcagctgcaggagtcgggcccaggactggtgaagccttcacagaccctgtccctgacctgcactgtctctggtggctccatcaccagtggtggttactcctggagctggatccgccagcacccagggaagggcctggagtggattgggtccatgtcttacagtgggagcacctactacaacccgtccctcaagagtcgagttaccatatcagtagacacgtctaagaaccagttctccctgaacttgagctctgtgactgccgcggacacggccgtgtattactgtgcctcttcgggccggattactatttactactggggccagggaaccctgatcaccgtctcctcagcgtcgaccaagggcccatcggtcttccccctggcaccctcctccaagagcacctctgggggcacagcggccctgggctgcctggtcaaggactacttccccgaaccagtgacggtgtcgtggaactcaggcgccctgaccagcggcgtgcacaccttcccggctgtcctacagtcctcaggactctactccctcagcagcgtggtgaccgtgccctccagcagcttgggcacccagacctacatctgcaacgtgaatcacaagcccagcaacaccaaggtggacaagaaagttgagcccaaatcttgtgacaaaactcacacatgcccaccgtgcccagcacctgaactcctggggggaccgtcagtcttcctcttccccccaaaacccaaggacaccctcatgatctcccggacccctgaggtcacatgcgtggtggtggacgtgagccacgaagaccctgaggtcaagttcaactggtacgtggacggcgtggaggtgcataatgccaagacaaagccgcgggaggagcagtacaacagcacgtaccgtgtggtcagcgtcctcaccgtcctgcaccaggactggctgaatggcaaggagtacaagtgcaaggtctccaacaaagccctcccagcccccatcgagaaaaccatctccaaagccaaagggcagccccgagaaccacaggtgtacaccctgcccccatcccgggatgagctgaccaagaaccaggtcagcctgacctgcctggtcaaaggcttctatcccagcgacatcgccgtggagtgggagagcaatgggcagccggagaacaactacaagaccacgcctcccgtgctggactccgacggctccttcttcctctacagcaagctcaccgtggacaagagcaggtggcagcaggggaacgtcttctcatgctccgtgctgcatgaggctctgcacagccactacacgcagaagagcctctccctgtctccgggtaaatga

SEQ ID NO: 1242 - DNA, 1407 bp, Artificial Sequence
  Description of Artificial Sequence: Synthetic polynucleotide
atgggatggtcatgtatcatcctttttctagtagcaactgcaaccggtgtacattccgaggtgcagctggtggagtctgggggaggcttggtccagcctggggggtccctgagactctcctgtgcagcctctggattcaccgtcagtagcaactatatagcctgggtccgccaggctccagggaaggggctggagtgggtctcaattatttttagcggtaataactcatactacgcagactccgtgaagggccggttctccatctccagagacaattccaagaacacagtgtttcttcaaatgaacagcctgagagctgaggacacggctgtgtattattgtgcgagagggaggtggctggtcggatacggtatggacgtctggggccaagggaccacggtcaccgtctcctcagcgtcgaccaagggcccatcggtcttccccctggcaccctcctccaagagcacctctgggggcacagcggccctgggctgcctggtcaaggactacttccccgaaccagtgacggtgtcgtggaactcaggcgccctgaccagcggcgtgcacaccttcccggctgtcctacagtcctcaggactctactccctcagcagcgtggtgaccgtgccctccagcagcttgggcacccagacctacatctgcaacgtgaatcacaagcccagcaacaccaaggtggacaagaaagttgagcccaaatcttgtgacaaaactcacacatgcccaccgtgcccagcacctgaactcctggggggaccgtcagtcttcctcttccccccaaaacccaaggacaccctcatgatctcccggacccctgaggtcacatgcgtggtggtggacgtgagccacgaagaccctgaggtcaagttcaactggtacgtggacggcgtggaggtgcataatgccaagacaaagccgcgggaggagcagtacaacagcacgtaccgtgtggtcagcgtcctcaccgtcctgcaccaggactggctgaatggcaaggagtacaagtgcaaggtctccaacaaagccctcccagcccccatcgagaaaaccatctccaaagccaaagggcagccccgagaaccacaggtgtacaccctgcccccatcccgggatgagctgaccaagaaccaggtcagcctgacctgcctggtcaaaggcttctatcccagcgacatcgccgtggagtgggagagcaatgggcagccggagaacaactacaagaccacgcctcccgtgctggactccgacggctccttcttcctctacagcaagctcaccgtggacaagagcaggtggcagcaggggaacgtcttctcatgctccgtgctgcatgaggctctgcacagccactacacgcagaagagcctctccctgtctccgggtaaatga

SEQ ID NO: 1243 - DNA, 1410 bp, Artificial Sequence
  Description of Artificial Sequence: Synthetic polynucleotide
atgggatggtcatgtatcatcctttttctagtagcaactgcaaccggtgtacattcccaggtccagctggtgcaatctggggctgaggtgaagaagcctgggtcctcggtgaaggtctcctgcaaggcttctggaggcaccttcagcagctatagtatcagttgggtgcgacaggcccctggacaagggcttgagtggatgggaaggatcatccccatgtttggtacagtaagcaacgtacagaagttccagggcagagtcacgattaccgcggacaaatccacgagcacagcctacatggagctgagcagcctgagatctgaggacacggccgtgtattactgtgcgacaggggcagtgggagctactattttggttgactactggggccagggaaccctggtcaccgtctcctcagcgtcgaccaagggcccatcggtcttccccctggcaccctcctccaagagcacctctgggggcacagcggccctgggctgcctggtcaaggactacttccccgaaccagtgacggtgtcgtggaactcaggcgccctgaccagcggcgtgcacaccttcccggctgtcctacagtcctcaggactctactccctcagcagcgtggtgaccgtgccctccagcagcttgggcacccagacctacatctgcaacgtgaatcacaagcccagcaacaccaaggtggacaagaaagttgagcccaaatcttgtgacaaaactcacacatgcccaccgtgcccagcacctgaactcctggggggaccgtcagtcttcctcttccccccaaaacccaaggacaccctcatgatctcccggacccctgaggtcacatgcgtggtggtggacgtgagccacgaagaccctgaggtcaagttcaactggtacgtggacggcgtggaggtgcataatgccaagacaaagccgcgggaggagcagtacaacagcacgtaccgtgtggtcagcgtcctcaccgtcctgcaccaggactggctgaatggcaaggagtacaagtgcaaggtctccaacaaagccctcccagcccccatcgagaaaaccatctccaaagccaaagggcagccccgagaaccacaggtgtacaccctgcccccatcccgggatgagctgaccaagaaccaggtcagcctgacctgcctggtcaaaggcttctatcccagcgacatcgccgtggagtgggagagcaatgggcagccggagaacaactacaagaccacgcctcccgtgctggactccgacggctccttcttcctctacagcaagctcaccgtggacaagagcaggtggcagcaggggaacgtcttctcatgctccgtgctgcatgaggctctgcacagccactacacgcagaagagcctctccctgtctccgggtaaatga

SEQ ID NO: 1244 - DNA, 722 bp, Artificial Sequence
  Description of Artificial Sequence: Synthetic polynucleotide
atgggatggtcatgtatcatcctttttctagtagcaactgcaaccggtgtacattcagatattgtgatgacccagactccactctcctcacctgtcacccttggacagccggcctccatctcctgcaggtctagtcaaagcctcgtacacagtgatggaaacacctacttgagttggcttcagcagaggccaggccagcctccaagactcctaatttataagatttctaaccggttctctggggtcccagacagattcagtggcagtggggcagggacagatttcacactgaaaatcagcagggtggaagctgaggatgtcggggtttattactgcatgcaaggtacacaatttcctcaggtcaccttcggccaagggacacgactggagattaaacgtacggtggctgcaccatctgtcttcatcttcccgccatctgatgagcagttgaaatctggaactgcctctgttgtgtgcctgctgaataacttctaccccagagaagccaaagtgcagtggaaggtggacaacgccctgcagagcggaaacagccaggaaagcgtgacagagcaggattccaaggattccacatacagcctgagcagcacactgacactgtccaaggccgactacgagaagcacaaggtgtacgcctgcgaagtgacacaccagggactgtcctcccctgtgacaaagagcttcaacagaggagaatgctgata

SEQ ID NO: 1245 - DNA, 704 bp, Artificial Sequence
  Description of Artificial Sequence: Synthetic polynucleotide
atgggatggtcatgtatcatcctttttctagtagcaactgcaaccggtgtacattcagacatccagatgacccagtctccatcctccctgtctgcatctgtaagagacagagtcaccatcacttgccgggcaagtcagaacattagcaactatttaaattggtatcagcagagaccagggaaagcccctaaattcttgatctatgctgcatccagtttgcaaagtggggtcccatcaaggttcagtggcagtgggtctgggacagatttcactctcaccatcagcagtctgcaacctgaagatttcgccacttactactgtcaacagagttacaatagtcctcggacgttcggccaagggaccaaagtggaaatcaaacgtacggtggctgcaccatctgtcttcatcttcccgccatctgatgagcagttgaaatctggaactgcctctgttgtgtgcctgctgaataacttctaccccagagaagccaaagtgcagtggaaggtggacaacgccctgcagagcggaaacagccaggaaagcgtgacagagcaggattccaaggattccacatacagcctgagcagcacactgacactgtccaaggccgactacgagaagcacaaggtgtacgcctgcgaagtgacacaccagggactgtcctcccctgtgacaaagagcttcaacagaggagaatgctgata

SEQ ID NO: 1246 - DNA, 704 bp, Artificial Sequence
  Description of Artificial Sequence: Synthetic polynucleotide
atgggatggtcatgtatcatcctttttctagtagcaactgcaaccggtgtacattcagaaatagtgatgacgcagtctccagcccccctgtctgtgtctccaggggaaagagccaccctctcctgcagggccaatcagagtattagtagcaacttagcctggtaccagcagaaacctggccaggctcccaggctcctcatctatggtgcatccaccagggccactggtatcccagccaggttcagtggcagtgggtctgggacagagttcactctcaccatcagcagcctgcagtctgaagattttgcagtttattactgtcagcagtttaataactggcctcggacattcggccaagggaccaaagtggaaatcaaacgtacggtggctgcaccatctgtcttcatcttcccgccatctgatgagcagttgaaatctggaactgcctctgttgtgtgcctgctgaataacttctaccccagagaagccaaagtgcagtggaaggtggacaacgccctgcagagcggaaacagccaggaaagcgtgacagagcaggattccaaggattccacatacagcctgagcagcacactgacactgtccaaggccgactacgagaagcacaaggtgtacgcctgcgaagtgacacaccagggactgtcctcccctgtgacaaagagcttcaacagaggagaatgctgata

SEQ ID NO: 1247 - DNA, 722 bp, Artificial Sequence
  Description of Artificial Sequence: Synthetic polynucleotide
atgggatggtcatgtatcatcctttttctagtagcaactgcaaccggtgtacattcagatattgtgatgacccagactccactctcctcacctgtcacccttggacagccggcctccatctcctgcaggtctagtcaaagcctcgtaagcagtgatggaaacacctacttgagttggcttcagcagaggccaggccagcctccaagactcctaatttataagatttctaaccgattctctggggtcccagacagattcagtggcagtggggcagggacagatttcacactgaaaatcagcagggtggaagctgaggatgtcggggtttattactgcatgcaagctacacaatttcctctgatcaccttcggccaagggacacgactggagattaaacgtacggtggctgcaccatctgtcttcatcttcccgccatctgatgagcagttgaaatctggaactgcctctgttgtgtgcctgctgaataacttctaccccagagaagccaaagtgcagtggaaggtggacaacgccctgcagagcggaaacagccaggaaagcgtgacagagcaggattccaaggattccacatacagcctgagcagcacactgacactgtccaaggccgactacgagaagcacaaggtgtacgcctgcgaagtgacacaccagggactgtcctcccctgtgacaaagagcttcaacagaggagaatgctgata

SEQ ID NO: 1248 - DNA, 704 bp, Artificial Sequence
  Description of Artificial Sequence: Synthetic polynucleotide
atgggatggtcatgtatcatcctttttctagtagcaactgcaaccggtgtacattcagaaattgtgttgacgcagtctccaggcaccctgtctttgtctccaggggatagagccaccctctcctgcagggccagtcagagtgttaccagcagcttcttagcctggtaccagcagaaacctggccaggctcccaggctcctcatctatggtgcatccaccagggccaccggcatcccagacaggttcagtggcagtgggtctgggacagacttcactctcaccatcagcagactggagcctgaagattttgcagtgttttactgtcagcagtatggtagctcgctcaccttcggccaagggacacgactggagattaaacgtacggtggctgcaccatctgtcttcatcttcccgccatctgatgagcagttgaaatctggaactgcctctgttgtgtgcctgctgaataacttctaccccagagaagccaaagtgcagtggaaggtggacaacgccctgcagagcggaaacagccaggaaagcgtgacagagcaggattccaaggattccacatacagcctgagcagcacactgacactgtccaaggccgactacgagaagcacaaggtgtacgcctgcgaagtgacacaccagggactgtcctcccctgtgacaaagagcttcaacagaggagaatgctgata

SEQ ID NO: 1249 - DNA, 719 bp, Artificial Sequence
  Description of Artificial Sequence: Synthetic polynucleotide
atgggatggtcatgtatcatcctttttctagtagcaactgcaaccggtgtacattcagatgttgtgatgactcagtctccactctccctgcccgtcacccttggacagccggcctccatctcctgcaggtctaatcaaagcctcgtattcagtgatggaaacacctacttgaattggtttcagcagaggccaggccaatctccaaggcgcctaatttataaggtttctaactgggactctggggtcccagacagattcagcggcagtgggtcaggcactgatttcacactgaaaatcagcagggtggaggctgaggatgttggggtttattactgcatgcaaggtacacactggcctcccaccttcggccaagggacacgactggagattaaacgtacggtggctgcaccatctgtcttcatcttcccgccatctgatgagcagttgaaatctggaactgcctctgttgtgtgcctgctgaataacttctaccccagagaagccaaagtgcagtggaaggtggacaacgccctgcagagcggaaacagccaggaaagcgtgacagagcaggattccaaggattccacatacagcctgagcagcacactgacactgtccaaggccgactacgagaagcacaaggtgtacgcctgcgaagtgacacaccagggactgtcctcccctgtgacaaagagcttcaacagaggagaatgctgata

SEQ ID NO: 1250 - DNA, 1419 bp, Artificial Sequence
  Description of Artificial Sequence: Synthetic polynucleotide
atgcgcatgcagctgctgctgctgatcgccctgtccctggccctggtgaccaactcccaggtccagctggtgcagtctggggctgaggtgaagaagcctgggtcctcggtgaaggtctcctgcaaggcttctggaggcaccttcagtaggtatgctatcaactgggtgcgacaggcccctggacaagggcttgagtggatgggaaggatcatccctatctttggtatagcaaactacgcacagaaattccagggcaaagtcacgattaccgcggacaaatccacgagcacagcctacatggagctgagcagcctgagatctgaggacacggccgtgtattactgtgcgagagcggattattactatgatagtagtggttatttctttgactactggggccagggaaccctggtcaccgtctcctcagcttccaccaagggcccctccgtgttccccctggccccctcctccaagtccacctccggcggcaccgccgccctgggctgcctggtgaaggactacttccccgagcccgtgaccgtgtcctggaactccggcgccctgacctccggcgtgcacaccttccccgccgtgctgcagtcctccggcctgtactccctgtcctccgtggtgaccgtgccctcctcctccctgggcacccagacctacatctgcaacgtgaaccacaagccctccaacaccaaggtggacaagaaggtggagcccaagtcctgcgacaagacccacacctgccccccctgccccgcccccgagctgctgggcggcccctccgtgttcctgttcccccccaagcccaaggacaccctgatgatctcccgcacccccgaggtgacctgcgtggtggtggacgtgtcccacgaggaccccgaggtgaagttcaactggtacgtggacggcgtggaggtgcacaacgccaagaccaagccccgcgaggagcagtacaactccacctaccgcgtggtgtccgtgctgaccgtgctgcaccaggactggctgaacggcaaggagtacaagtgcaaggtgtccaacaaggccctgcccgcccccatcgagaagaccatctccaaggccaagggccagccccgcgagccccaggtgtacaccctgcccccctcccgcgacgagctgaccaagaaccaggtgtccctgacctgcctggtgaagggcttctacccctccgacatcgccgtggagtgggagtccaacggccagcccgagaacaactacaagaccaccccccccgtgctggactccgacggctccttcttcctgtactccaagctgaccgtggacaagtcccgctggcagcagggcaacgtgttctcctgctccgtgctgcacgaggccctgcactcccactacacccagaagtccctgtccctgtcccccggcaagtaa

SEQ ID NO: 1251 - RNA, 1416 nt, Artificial Sequence
  Description of Artificial Sequence: Synthetic polynucleotide
augcgcaugcagcugcugcugcugaucgcccugucccuggcccuggugaccaacucccagguccagcuggugcagucuggggcugaggugaagaagccuggguccucggugaaggucuccugcaaggcuucuggaggcaccuucaguagguaugcuaucaacugggugcgacaggccccuggacaagggcuugaguggaugggaaggaucaucccuaucuuugguauagcaaacuacgcacagaaauuccagggcaaagucacgauuaccgcggacaaauccacgagcacagccuacauggagcugagcagccugagaucugaggacacggccguguauuacugugcgagagcggauuauuacuaugauaguagugguuauuucuuugacuacuggggccagggaacccuggucaccgucuccucagcuuccaccaagggccccuccguguucccccuggcccccuccuccaaguccaccuccggcggcaccgccgcccugggcugccuggugaaggacuacuuccccgagcccgugaccguguccuggaacuccggcgcccugaccuccggcgugcacaccuuccccgccgugcugcaguccuccggccuguacucccuguccuccguggugaccgugcccuccuccucccugggcacccagaccuacaucugcaacgugaaccacaagcccuccaacaccaagguggacaagaagguggagcccaaguccugcgacaagacccacaccugcccccccugccccgcccccgagcugcugggcggccccuccguguuccuguucccccccaagcccaaggacacccugaugaucucccgcacccccgaggugaccugcguggugguggacgugucccacgaggaccccgaggugaaguucaacugguacguggacggcguggaggugcacaacgccaagaccaagccccgcgaggagcaguacaacuccaccuaccgcgugguguccgugcugaccgugcugcaccaggacuggcugaacggcaaggaguacaagugcaagguguccaacaaggcccugcccgcccccaucgagaagaccaucuccaaggccaagggccagccccgcgagccccagguguacacccugccccccucccgcgacgagcugaccaagaaccaggugucccugaccugccuggugaagggcuucuaccccuccgacaucgccguggagugggaguccaacggccagcccgagaacaacuacaagaccaccccccccgugcuggacuccgacggcuccuucuuccuguacuccaagcugaccguggacaagucccgcuggcagcagggcaacguguucuccugcuccgugcugcacgaggcccugcacucccacuacacccagaagucccugucccugucccccggcaag

SEQ ID NO: 1252 - protein, 472 aa, Artificial Sequence
  Description of Artificial Sequence: Synthetic polypeptide
MRMQLLLLIALSLALVTNSQVQLVQSGAEVKKPGSSVKVSCKASGGTFSRYAINWVRQAPGQGLEWMGRIIPIFGIANYAQKFQGKVTITADKSTSTAYMELSSLRSEDTAVYYCARADYYYDSSGYFFDYWGQGTLVTVSSASTKGPSVFPLAPSSKSTSGGTAALGCLVKDYFPEPVTVSWNSGALTSGVHTFPAVLQSSGLYSLSSVVTVPSSSLGTQTYICNVNHKPSNTKVDKKVEPKSCDKTHTCPPCPAPELLGGPSVFLFPPKPKDTLMISRTPEVTCVVVDVSHEDPEVKFNWYVDGVEVHNAKTKPREEQYNSTYRVVSVLTVLHQDWLNGKEYKCKVSNKALPAPIEKTISKAKGQPREPQVYTLPPSRDELTKNQVSLTCLVKGFYPSDIAVEWESNGQPENNYKTTPPVLDSDGSFFLYSKLTVDKSRWQQGNVFSCSVLHEALHSHYTQKSLSLSPGK

SEQ ID NO: 1253 - DNA, 702 bp, Artificial Sequence
  Description of Artificial Sequence: Synthetic polynucleotide
atgcgcatgcagctgctgctgctgatcgccctgtccctggccctggtgaccaactccgaaattgtgttgacgcagtctccaggcaccctgtctttgtctccaggggaaagagccaccctctcctgcagggccagtcagagtgttagcagcagctacttagcctggtaccagcagaaacctggccagactcccaggctcctcatctatggtgcatccagcagggccaccggcatcccagccaggttcagtggcagtgggtctgggacaaacttcactctcaccatcagcagactggagcctgaagattttgcagtgtattactgtcagcagtatagtagctcacggacgttcggccaagggaccaaggtggaaatcaaacgaaccgtggccgccccctccgtgttcatcttccccccctccgacgagcagctgaagtccggcaccgcctccgtggtgtgcctgctgaacaacttctacccccgcgaggccaaggtgcagtggaaggtggacaacgccctgcagtccggcaactcccaggagtccgtgaccgagcaggactccaaggactccacctactccctgtcctccaccctgaccctgtccaaggccgactacgagaagcacaaggtgtacgcctgcgaggtgacccaccagggcctgtcctcccccgtgaccaagtccttcaaccgcggcgagtgctaa

SEQ ID NO: 1254 - RNA, 699 nt, Artificial Sequence
  Description of Artificial Sequence: Synthetic polynucleotide
augcgcaugcagcugcugcugcugaucgcccugucccuggcccuggugaccaacuccgaaauuguguugacgcagucuccaggcacccugucuuugucuccaggggaaagagccacccucuccugcagggccagucagaguguuagcagcagcuacuuagccugguaccagcagaaaccuggccagacucccaggcuccucaucuauggugcauccagcagggccaccggcaucccagccagguucaguggcagugggucugggacaaacuucacucucaccaucagcagacuggagccugaagauuuugcaguguauuacugucagcaguauaguagcucacggacguucggccaagggaccaagguggaaaucaaacgaaccguggccgcccccuccguguucaucuucccccccuccgacgagcagcugaaguccggcaccgccuccguggugugccugcugaacaacuucuacccccgcgaggccaaggugcaguggaagguggacaacgcccugcaguccggcaacucccaggaguccgugaccgagcaggacuccaaggacuccaccuacucccuguccuccacccugacccuguccaaggccgacuacgagaagcacaagguguacgccugcgaggugacccaccagggccuguccucccccgugaccaaguccuucaaccgcggcgagugc

SEQ ID NO: 1255 - protein, 233 aa, Artificial Sequence
  Description of Artificial Sequence: Synthetic polypeptide
MRMQLLLLIALSLALVTNSEIVLTQSPGTLSLSPGERATLSCRASQSVSSSYLAWYQQKPGQTPRLLIYGASSRATGIPARFSGSGSGTNFTLTISRLEPEDFAVYYCQQYSSSRTFGQGTKVEIKRTVAAPSVFIFPPSDEQLKSGTASVVCLLNNFYPREAKVQWKVDNALQSGNSQESVTEQDSKDSTYSLSSTLTLSKADYEKHKVYACEVTHQGLSSPVTKSFNRGEC

SEQ ID NO: 1256 - DNA, 1425 bp, Artificial Sequence
  Description of Artificial Sequence: Synthetic polynucleotide
atgcgcatgcagctgctgctgctgatcgccctgtccctggccctggtgaccaactccgaggtgcagctggtggagtctgggggaggcttggtccagcctggggggtccctgagactctcctgtgcagcctctggagtcacctttagtagctattggatgagttgggtccgccaggctccaggaaaagggctggagtgggtggccaacataagacaagatggaagtgagaaatactctgtggactctgtgaagggccgattcaccatctccagagacaacgccaagaactcactgtatctgcaaatgaacagcctgagagccgaggacacggctgtgtattactgtgcgagggctcgaagggctgataatagtggttattacgggtttcactttgactgctggggccagggaaccctggtcaccgtctcctcagcttccaccaagggcccctccgtgttccccctggccccctcctccaagtccacctccggcggcaccgccgccctgggctgcctggtgaaggactacttccccgagcccgtgaccgtgtcctggaactccggcgccctgacctccggcgtgcacaccttccccgccgtgctgcagtcctccggcctgtactccctgtcctccgtggtgaccgtgccctcctcctccctgggcacccagacctacatctgcaacgtgaaccacaagccctccaacaccaaggtggacaagaaggtggagcccaagtcctgcgacaagacccacacctgccccccctgccccgcccccgagctgctgggcggcccctccgtgttcctgttcccccccaagcccaaggacaccctgatgatctcccgcacccccgaggtgacctgcgtggtggtggacgtgtcccacgaggaccccgaggtgaagttcaactggtacgtggacggcgtggaggtgcacaacgccaagaccaagccccgcgaggagcagtacaactccacctaccgcgtggtgtccgtgctgaccgtgctgcaccaggactggctgaacggcaaggagtacaagtgcaaggtgtccaacaaggccctgcccgcccccatcgagaagaccatctccaaggccaagggccagccccgcgagccccaggtgtacaccctgcccccctcccgcgacgagctgaccaagaaccaggtgtccctgacctgcctggtgaagggcttctacccctccgacatcgccgtggagtgggagtccaacggccagcccgagaacaactacaagaccaccccccccgtgctggactccgacggctccttcttcctgtactccaagctgaccgtggacaagtcccgctggcagcagggcaacgtgttctcctgctccgtgctgcacgaggccctgcactcccactacacccagaagtccctgtccctgtcccccggcaagtaa

SEQ ID NO: 1257 - RNA, 1422 nt, Artificial Sequence
  Description of Artificial Sequence: Synthetic polynucleotide
augcgcaugcagcugcugcugcugaucgcccugucccuggcccuggugaccaacuccgaggugcagcugguggagucugggggaggcuugguccagccuggggggucccugagacucuccugugcagccucuggagucaccuuuaguagcuauuggaugaguuggguccgccaggcuccaggaaaagggcuggaguggguggccaacauaagacaagauggaagugagaaauacucuguggacucugugaagggccgauucaccaucuccagagacaacgccaagaacucacuguaucugcaaaugaacagccugagagccgaggacacggcuguguauuacugugcgagggcucgaagggcugauaauagugguuauuacggguuucacuuugacugcuggggccagggaacccuggucaccgucuccucagcuuccaccaagggccccuccguguucccccuggcccccuccuccaaguccaccuccggcggcaccgccgcccugggcugccuggugaaggacuacuuccccgagcccgugaccguguccuggaacuccggcgcccugaccuccggcgugcacaccuuccccgccgugcugcaguccuccggccuguacucccuguccuccguggugaccgugcccuccuccucccugggcacccagaccuacaucugcaacgugaaccacaagcccuccaacaccaagguggacaagaagguggagcccaaguccugcgacaagacccacaccugcccccccugccccgcccccgagcugcugggcggccccuccguguuccuguucccccccaagcccaaggacacccugaugaucucccgcacccccgaggugaccugcguggugguggacgugucccacgaggaccccgaggugaaguucaacugguacguggacggcguggaggugcacaacgccaagaccaagccccgcgaggagcaguacaacuccaccuaccgcgugguguccgugcugaccgugcugcaccaggacuggcugaacggcaaggaguacaagugcaagguguccaacaaggcccugcccgcccccaucgagaagaccaucuccaaggccaagggccagccccgcgagccccagguguacacccugccccccucccgcgacgagcugaccaagaaccaggugucccugaccugccuggugaagggcuucuaccccuccgacaucgccguggagugggaguccaacggccagcccgagaacaacuacaagaccaccccccccgugcuggacuccgacggcuccuucuuccuguacuccaagcugaccguggacaagucccgcuggcagcagggcaacguguucuccugcuccgugcugcacgaggcccugcacucccacuacacccagaagucccugucccugucccccggcaag

SEQ ID NO: 1258 - protein, 474 aa, Artificial Sequence
  Description of Artificial Sequence: Synthetic polypeptide
MRMQLLLLIALSLALVTNSEVQLVESGGGLVQPGGSLRLSCAASGVTFSSYWMSWVRQAPGKGLEWVANIRQDGSEKYSVDSVKGRFTISRDNAKNSLYLQMNSLRAEDTAVYYCARARRADNSGYYGFHFDCWGQGTLVTVSSASTKGPSVFPLAPSSKSTSGGTAALGCLVKDYFPEPVTVSWNSGALTSGVHTFPAVLQSSGLYSLSSVVTVPSSSLGTQTYICNVNHKPSNTKVDKKVEPKSCDKTHTCPPCPAPELLGGPSVFLFPPKPKDTLMISRTPEVTCVVVDVSHEDPEVKFNWYVDGVEVHNAKTKPREEQYNSTYRVVSVLTVLHQDWLNGKEYKCKVSNKALPAPIEKTISKAKGQPREPQVYTLPPSRDELTKNQVSLTCLVKGFYPSDIAVEWESNGQPENNYKTTPPVLDSDGSFFLYSKLTVDKSRWQQGNVFSCSVLHEALHSHYTQKSLSLSPGK

SEQ ID NO: 1259 - DNA, 711 bp, Artificial Sequence
  Description of Artificial Sequence: Synthetic polynucleotide
atgcgcatgcagctgctgctgctgatcgccctgtccctggccctggtgaccaactcccagtctgtgctgacgcagccgccctcagtgtctggggccccagggcagagggtcaccatctcctgcactgggagcagctccaacatcggggcaggttatgatgtacactggtaccagcagcttccaggaacagcccccaaactcctcatctatggtaacaataatcggccctcaggggtccctgaccgattctctgactccaagtctggcacctcagcctccctggccatcactaggctccaggctgaggatgaggctgattattactgccagtcctatgacagcagcctgagtggttgggtgttcggcggagggaccaagttgaccgtcctagggcagcccaaggccgccccctcggtcaccctgttcccgccctcctccgaggagctccaagccaacaaggccacactggtgtgcctcataagcgacttctaccccggagccgtgacagtggcctggaaggcagacagcagccccgtcaaggcgggagtggagaccaccacaccctccaaacaaagcaacaacaagtacgcggccagcagctacctgagcctgacgcccgagcagtggaagtcccacagaagctacagctgccaggtcacgcacgaagggagcaccgtggagaagacagtggcccccacagaatgctcataa

SEQ ID NO: 1260 - RNA, 708 nt, Artificial Sequence
  Description of Artificial Sequence: Synthetic polynucleotide
augcgcaugcagcugcugcugcugaucgcccugucccuggcccuggugaccaacucccagucugugcugacgcagccgcccucagugucuggggccccagggcagagggucaccaucuccugcacugggagcagcuccaacaucggggcagguuaugauguacacugguaccagcagcuuccaggaacagcccccaaacuccucaucuaugguaacaauaaucggcccucaggggucccugaccgauucucugacuccaagucuggcaccucagccucccuggccaucacuaggcuccaggcugaggaugaggcugauuauuacugccaguccuaugacagcagccugagugguuggguguucggcggagggaccaaguugaccguccuagggcagcccaaggccgcccccucggucacccuguucccgcccuccuccgaggagcuccaagccaacaaggccacacuggugugccucauaagcgacuucuaccccggagccgugacaguggccuggaaggcagacagcagccccgucaaggcgggaguggagaccaccacacccuccaaacaaagcaacaacaaguacgcggccagcagcuaccugagccugacgcccgagcaguggaagucccacagaagcuacagcugccaggucacgcacgaagggagcaccguggagaagacaguggcccccacagaaugcuca

SEQ ID NO: 1261 - protein, 236 aa, Artificial Sequence
  Description of Artificial Sequence: Synthetic polypeptide
MRMQLLLLIALSLALVTNSQSVLTQPPSVSGAPGQRVTISCTGSSSNIGAGYDVHWYQQLPGTAPKLLIYGNNNRPSGVPDRFSDSKSGTSASLAITRLQAEDEADYYCQSYDSSLSGWVFGGGTKLTVLGQPKAAPSVTLFPPSSEELQANKATLVCLISDFYPGAVTVAWKADSSPVKAGVETTTPSKQSNNKYAASSYLSLTPEQWKSHRSYSCQVTHEGSTVEKTVAPTECS

SEQ ID NO: 1262 - DNA, 4053 bp, Artificial Sequence
  Description of Artificial Sequence: Synthetic polynucleotide
tctttcctgcgttatcccctgattctgtggataaccgtattaccgcctttgagtgagctgataccgctcgccgcagccgaacgaccgagcgcagcgagtcagtgagcgaggaagcggaagagcgcccaatacgcaaaccgcctctccccgcgcgttggccgattcattaatgcagctggcacgacaggtttcccgactggaaagcgggcagtgagcgcaacgcaattaatgtgagttagctcactcattaggcaccccaggctttacactttatgcttccggctcgtatgttgtgtggaattgtgagcggataacaatttcacacaggaaacagctatgaccatgattacgaattgtaatacgactcactataagcataaaagtctcaacacaacatatacaaaacaaacgaatctcaagcaatcaagcattctacttctattgcagcaatttaaatcatttcttttaaagcaaaagcaattttctgaaaattttcaccatttacgaacgatagcgccatgcgcatgcagctgctgctgctgatcgccctgtccctggccctggtgaccaactcccatgggaggttaccaatgccacagagttggtgcaatcttcttcaactggaaagatagcgcttccaccaagggcccctccgtgttccccctggccccctcctccaagtccacctccggcggcaccgccgccctgggctgcctggtgaaggactacttccccgagcccgtgaccgtgtcctggaactccggcgccctgacctccggcgtgcacaccttccccgccgtgctgcagtcctccggcctgtactccctgtcctccgtggtgaccgtgccctcctcctccctgggcacccagacctacatctgcaacgtgaaccacaagccctccaacaccaaggtggacaagaaggtggagcccaagtcctgcgacaagacccacacctgccccccctgccccgcccccgagctgctgggcggcccctccgtgttcctgttcccccccaagcccaaggacaccctgatgatctcccgcacccccgaggtgacctgcgtggtggtggacgtgtcccacgaggaccccgaggtgaagttcaactggtacgtggacggcgtggaggtgcacaacgccaagaccaagccccgcgaggagcagtacaactccacctaccgcgtggtgtccgtgctgaccgtgctgcaccaggactggctgaacggcaaggagtacaagtgcaaggtgtccaacaaggccctgcccgcccccatcgagaagaccatctccaaggccaagggccagccccgcgagccccaggtgtacaccctgcccccctcccgcgacgagctgaccaagaaccaggtgtccctgacctgcctggtgaagggcttctacccctccgacatcgccgtggagtgggagtccaacggccagcccgagaacaactacaagaccaccccccccgtgctggactccgacggctccttcttcctgtactccaagctgaccgtggacaagtcccgctggcagcagggcaacgtgttctcctgctccgtgctgcacgaggccctgcactcccactacacccagaagtccctgtccctgtcccccggcaagtaaactagtagtgactgactaggatctggttaccactaaaccagcctcaagaacacccgaatggagtctctaagctacataataccaacttacacttacaaaatgttgtcccccaaaatgtagccattcgtatctgctcctaataaaaagaaagtttcttcacattctaaaaaaaaaaaaaaaaaaaaaaaaaaaaaaaaaaaaaaaaaaaaaaaaaaaaaaaaaaaaaaaaaaaaaaaaaaaaaaaaaaaaaaaaaaaaaaaaaaaaacttaagcggccgcgaattcgaattcgagctcggtacccggggatcctctagagtcgacctgcaggcatgcaagcttggcactggccgtcgttttacaacgtcgtgactgggaaaaccctggcgttacccaacttaatcgccttgcagcacatccccctttcgccagctggcgtaatagcgaagaggcccgcaccgatcgcccttcccaacagttgcgcagcctgaatggcgaatgcgatttattcaacaaagccgccgtcccgtcaagtcagcgtaatgctctgccagtgttacaaccaattaaccaattctgattagaaaaactcatcgagcatcaaatgaaactgcaatttattcatatcaggattatcaataccatatttttgaaaaagccgtttctgtaatgaaggagaaaactcaccgaggcagttccataggatggcaagatcctggtatcggtctgcgattccgactcgtccaacatcaatacaacctattaatttcccctcgtcaaaaataaggttatcaagtgagaaatcaccatgagtgacgactgaatccggtgagaatggcaaaagcttatgcatttctttccagacttgttcaacaggccagccattacgctcgtcatcaaaatcactcgcatcaaccaaaccgttattcattcgtgattgcgcctgagcgagacgaaatacgcgatcgctgttaaaaggacaattacaaacaggaatcgaatgcaaccggcgcaggaacactgccagcgcatcaacaatattttcacctgaatcaggatattcttctaatacctggaatgctgttttcccggggatcgcagtggtgagtaaccatgcatcatcaggagtacggataaaatgcttgatggtcggaagaggcataaattccgtcagccagtttagtctgaccatctcatctgtaacatcattggcaacgctacctttgccatgtttcagaaacaactctggcgcatcgggcttcccatacaatcgatagattgtcgcacctgattgcccgacattatcgcgagcccatttatacccatataaatcagcatccatgttggaatttaatcgcggcttcgagcaagacgtttcccgttgaatatggctcataacaccccttgtattactgtttatgtaagcagacagttttattgttcatgatgatatatttttatcttgtgcaatgtaacatcagagattttgagacacaacgtggctttgttgaataaatcgaacttttgctgagttgaaggatcagatcacgcatcttcccgacaacgcagaccgttccgtggcaaagcaaaagttcaaaatcaccaactggtccacctacaacaaagctctcatcaaccgtggctccctcactttctggctggatgatggggcgattcaggcctggtatgagtcagcaacaccttcttcacgaggcagacctctcgacggatcgttccactgagcgtcagaccccgtagaaaagatcaaaggatcttcttgagatcctttttttctgcgcgtaatctgctgcttgcaaacaaaaaaaccaccgctaccagcggtggtttgtttgccggatcaagagctaccaactctttttccgaaggtaactggcttcagcagagcgcagataccaaatactgtccttctagtgtagccgtagttaggccaccacttcaagaactctgtagcaccgcctacatacctcgctctgctaatcctgttaccagtggctgctgccagtggcgataagtcgtgtcttaccgggttggactcaagacgatagttaccggataaggcgcagcggtcgggctgaacggggggttcgtgcacacagcccagcttggagcgaacgacctacaccgaactgagatacctacagcgtgagcattgagaaagcgccacgcttcccgaagggagaaaggcggacaggtatccggtaagcggcagggtcggaacaggagagcgcacgagggagcttccagggggaaacgcctggtatctttatagtcctgtcgggtttcgccacctctgacttgagcgtcgatttttgtgatgctcgtcaggggggcggagcctatggaaaaacgccagcaacgcggcctttttacggttcctggccttttgctggccttttgctcacatgt

SEQ ID NO: 1263 - DNA, 3376 bp, Artificial Sequence
  Description of Artificial Sequence: Synthetic polynucleotide
tctttcctgcgttatcccctgattctgtggataaccgtattaccgcctttgagtgagctgataccgctcgccgcagccgaacgaccgagcgcagcgagtcagtgagcgaggaagcggaagagcgcccaatacgcaaaccgcctctccccgcgcgttggccgattcattaatgcagctggcacgacaggtttcccgactggaaagcgggcagtgagcgcaacgcaattaatgtgagttagctcactcattaggcaccccaggctttacactttatgcttccggctcgtatgttgtgtggaattgtgagcggataacaatttcacacaggaaacagctatgaccatgattacgaattgtaatacgactcactataagcataaaagtctcaacacaacatatacaaaacaaacgaatctcaagcaatcaagcattctacttctattgcagcaatttaaatcatttcttttaaagcaaaagcaattttctgaaaattttcaccatttacgaacgatagcgccatgcgcatgcagctgctgctgctgatcgccctgtccctggccctggtgaccaactcccatgggaggttaccaatgccacagagttggtgcaatcttcttcaactggaaagatacccgggcagcccaaggccgccccctcggtcaccctgttcccgccctcctccgaggagctccaagccaacaaggccacactggtgtgcctcataagcgacttctaccccggagccgtgacagtggcctggaaggcagacagcagccccgtcaaggcgggagtggagaccaccacaccctccaaacaaagcaacaacaagtacgcggccagcagctacctgagcctgacgcccgagcagtggaagtcccacagaagctacagctgccaggtcacgcacgaagggagcaccgtggagaagacagtggcccccacagaatgctcataaactagtagtgactgactaggatctggttaccactaaaccagcctcaagaacacccgaatggagtctctaagctacataataccaacttacacttacaaaatgttgtcccccaaaatgtagccattcgtatctgctcctaataaaaagaaagtttcttcacattctaaaaaaaaaaaaaaaaaaaaaaaaaaaaaaaaaaaaaaaaaaaaaaaaaaaaaaaaaaaaaaaaaaaaaaaaaaaaaaaaaaaaaaaaaaaaaaaaaaaaacttaagcggccgcgaattcgagctcggtaccaggggatcctctagagtcgacctgcaggcatgcaagcttggcactggccgtcgttttacaacgtcgtgactgggaaaaccctggcgttacccaacttaatcgccttgcagcacatccccctttcgccagctggcgtaatagcgaagaggcccgcaccgatcgcccttcccaacagttgcgcagcctgaatggcgaatgcgatttattcaacaaagccgccgtcccgtcaagtcagcgtaatgctctgccagtgttacaaccaattaaccaattctgattagaaaaactcatcgagcatcaaatgaaactgcaatttattcatatcaggattatcaataccatatttttgaaaaagccgtttctgtaatgaaggagaaaactcaccgaggcagttccataggatggcaagatcctggtatcggtctgcgattccgactcgtccaacatcaatacaacctattaatttcccctcgtcaaaaataaggttatcaagtgagaaatcaccatgagtgacgactgaatccggtgagaatggcaaaagcttatgcatttctttccagacttgttcaacaggccagccattacgctcgtcatcaaaatcactcgcatcaaccaaaccgttattcattcgtgattgcgcctgagcgagacgaaatacgcgatcgctgttaaaaggacaattacaaacaggaatcgaatgcaaccggcgcaggaacactgccagcgcatcaacaatattttcacctgaatcaggatattcttctaatacctggaatgctgtttttccggggatcgcagtggtgagtaaccatgcatcatcaggagtacggataaaatgcttgatggtcggaagaggcataaattccgtcagccagtttagtctgaccatctcatctgtaacatcattggcaacgctacctttgccatgtttcagaaacaactctggcgcatcgggcttcccatacaatcgatagattgtcgcacctgattgcccgacattatcgcgagcccatttatacccatataaatcagcatccatgttggaatttaatcgcggcttcgagcaagacgtttcccgttgaatatggctcataacaccccttgtattactgtttatgtaagcagacagttttattgttcatgatgatatatttttatcttgtgcaatgtaacatcagagattttgagacacaacgtggctttgttgaataaatcgaacttttgctgagttgaaggatcagatcacgcatcttcccgacaacgcagaccgttccgtggcaaagcaaaagttcaaaatcaccaactggtccacctacaacaaagctctcatcaaccgtggctccctcactttctggctggatgatggggcgattcaggcctggtatgagtcagcaacaccttcttcacgaggcagacctctcgacggatcgttccactgagcgtcagaccccgtagaaaagatcaaaggatcttcttgagatcctttttttctgcgcgtaatctgctgcttgcaaacaaaaaaaccaccgctaccagcggtggtttgtttgccggatcaagagctaccaactctttttccgaaggtaactggcttcagcagagcgcagataccaaatactgtccttctagtgtagccgtagttaggccaccacttcaagaactctgtagcaccgcctacatacctcgctctgctaatcctgttaccagtggctgctgccagtggcgataagtcgtgtcttaccgggttggactcaagacgatagttaccggataaggcgcagcggtcgggctgaacggggggttcgtgcacacagcccagcttggagcgaacgacctacaccgaactgagatacctacagcgtgagcattgagaaagcgccacgcttcccgaagggagaaaggcggacaggtatccggtaagcggcagggtcggaacaggagagcgcacgagggagcttccagggggaaacgcctggtatctttatagtcctgtcgggtttcgccacctctgacttgagcgtcgatttttgtgatgctcgtcaggggggcggagcctatggaaaaacgccagcaacgcggcctttttacggttcctggccttttgctggccttttgctcacatgt

SEQ ID NO: 1264 - DNA, 3385 bp, Artificial Sequence
  Description of Artificial Sequence: Synthetic polynucleotide
tctttcctgcgttatcccctgattctgtggataaccgtattaccgcctttgagtgagctgataccgctcgccgcagccgaacgaccgagcgcagcgagtcagtgagcgaggaagcggaagagcgcccaatacgcaaaccgcctctccccgcgcgttggccgattcattaatgcagctggcacgacaggtttcccgactggaaagcgggcagtgagcgcaacgcaattaatgtgagttagctcactcattaggcaccccaggctttacactttatgcttccggctcgtatgttgtgtggaattgtgagcggataacaatttcacacaggaaacagctatgaccatgattacgaattgtaatacgactcactataagcataaaagtctcaacacaacatatacaaaacaaacgaatctcaagcaatcaagcattctacttctattgcagcaatttaaatcatttcttttaaagcaaaagcaattttctgaaaattttcaccatttacgaacgatagcgccatgcgcatgcagctgctgctgctgatcgccctgtccctggccctggtgaccaactcccatgggaggttaccaatgccacagagttggtgcaatcttcttcaactggaaagatagttcgaaccgtggccgccccctccgtgttcatcttccccccctccgacgagcagctgaagtccggcaccgcctccgtggtgtgcctgctgaacaacttctacccccgcgaggccaaggtgcagtggaaggtggacaacgccctgcagtccggcaactcccaggagtccgtgaccgagcaggactccaaggactccacctactccctgtcctccaccctgaccctgtccaaggccgactacgagaagcacaaggtgtacgcctgcgaggtgacccaccagggcctgtcctcccccgtgaccaagtccttcaaccgcggcgagtgctaaactagtagtgactgactaggatctggttaccactaaaccagcctcaagaacacccgaatggagtctctaagctacataataccaacttacacttacaaaatgttgtcccccaaaatgtagccattcgtatctgctcctaataaaaagaaagtttcttcacattctaaaaaaaaaaaaaaaaaaaaaaaaaaaaaaaaaaaaaaaaaaaaaaaaaaaaaaaaaaaaaaaaaaaaaaaaaaaaaaaaaaaaaaaaaaaaaaaaaaaaacttaagcggccgcgaattcgcattcgagctcggtacccggggatcctctagagtcgacctgcaggcatgcaagcttggcactggccgtcgttttacaacgtcgtgactgggaaaaccctggcgttacccaacttaatcgccttgcagcacatccccctttcgccagctggcgtaatagcgaagaggcccgcaccgatcgcccttcccaacagttgcgcagcctgaatggcgaatgcgatttattcaacaaagccgccgtcccgtcaagtcagcgtaatgctctgccagtgttacaaccaattaaccaattctgattagaaaaactcatcgagcatcaaatgaaactgcaatttattcatatcaggattatcaataccatatttttgaaaaagccgtttctgtaatgaaggagaaaactcaccgaggcagttccataggatggcaagatcctggtatcggtctgcgattccgactcgtccaacatcaatacaacctattaatttcccctcgtcaaaaataaggttatcaagtgagaaatcaccatgagtgacgactgaatccggtgagaatggcaaaagcttatgcatttctttccagacttgttcaacaggccagccattacgctcgtcatcaaaatcactcgcatcaaccaaaccgttattcattcgtgattgcgcctgagcgagacgaaatacgcgatcgctgttaaaaggacaattacaaacaggaatcgaatgcaaccggcgcaggaacactgccagcgcatcaacaatattttcacctgaatcaggatattcttctaatacctggaatgctgttttcccggggatcgcagtggtgagtaaccatgcatcatcaggagtacggataaaatgcttgatggtcggaagaggcataaattccgtcagccagtttagtctgaccatctcatctgtaacatcattggcaacgctacctttgccatgtttcagaaacaactctggcgcatcgggcttcccatacaatcgatagattgtcgcacctgattgcccgacattatcgcgagcccatttatacccatataaatcagcatccatgttggaatttaatcgcggcttcgagcaagacgtttcccgttgaatatggctcataacaccccttgtattactgtttatgtaagcagacagttttattgttcatgatgatatatttttatcttgtgcaatgtaacatcagagattttgagacacaacgtggctttgttgaataaatcgaacttttgctgagttgaaggatcagatcacgcatcttcccgacaacgcagaccgttccgtggcaaagcaaaagttcaaaatcaccaactggtccacctacaacaaagctctcatcaaccgtggctccctcactttctggctggatgatggggcgattcaggcctggtatgagtcagcaacaccttcttcacgaggcagacctctcgacggatcgttccactgagcgtcagaccccgtagaaaagatcaaaggatcttcttgagatcctttttttctgcgcgtaatctgctgcttgcaaacaaaaaaaccaccgctaccagcggtggtttgtttgccggatcaagagctaccaactctttttccgaaggtaactggcttcagcagagcgcagataccaaatactgtccttctagtgtagccgtagttaggccaccacttcaagaactctgtagcaccgcctacatacctcgctctgctaatcctgttaccagtggctgctgccagtggcgataagtcgtgtcttaccgggttggactcaagacgatagttaccggataaggcgcagcggtcgggctgaacggggggttcgtgcacacagcccagcttggagcgaacgacctacaccgaactgagatacctacagcgtgagcattgagaaagcgccacgcttcccgaagggagaaaggcggacaggtatccggtaagcggcagggtcggaacaggagagcgcacgagggagcttccagggggaaacgcctggtatctttatagtcctgtcgggtttcgccacctctgacttgagcgtcgatttttgtgatgctcgtcaggggggcggagcctatggaaaaacgccagcaacgcggcctttttacggttcctggccttttgctggccttttgctcacatgt

SEQ ID NO: 1265 - protein, 475 aa, Artificial Sequence
  Description of Artificial Sequence: Synthetic polypeptide
MGWSCIILFLVATATGVHSQVQLQESGPGLVKPSQTLSLTCTVSGGSISSATYYWSWIRQPAGKGLEWIGHIYTSGTTNYNPSLKSRVTISVDTSKSQFSLKLNSVTAADTAVYYCARGLRFCSDTRCYPYFDYWGQGTLVTVSSASTKGPSVFPLAPSSKSTSGGTAALGCLVKDYFPEPVTVSWNSGALTSGVHTFPAVLQSSGLYSLSSVVTVPSSSLGTQTYICNVNHKPSNTKVDKKVEPKSCDKTHTCPPCPAPELLGGPSVFLFPPKPKDTLMISRTPEVTCVVVDVSHEDPEVKFNWYVDGVEVHNAKTKPREEQYNSTYRVVSVLTVLHQDWLNGKEYKCKVSNKALPAPIEKTISKAKGQPREPQVYTLPPSRDELTKNQVSLTCLVKGFYPSDIAVEWESNGQPENNYKTTPPVLDSDGSFFLYSKLTVDKSRWQQGNVFSCSVLHEALHSHYTQKSLSLSPGK

SEQ ID NO: 1266 - protein, 126 aa, Artificial Sequence
  Description of Artificial Sequence: Synthetic polypeptide
QVQLQESGPGLVKPSQTLSLTCTVSGGSISSATYYWSWIRQPAGKGLEWIGHIYTSGTTNYNPSLKSRVTISVDTSKSQFSLKLNSVTAADTAVYYCARGLRFCSDTRCYPYFDYWGQGTLVTVSS

SEQ ID NO: 1267 - protein, 233 aa, Artificial Sequence
  Description of Artificial Sequence: Synthetic polypeptide
MGWSCIILFLVATATGVHSDIVMTQSPPSLSASVGDRVTITCRASQSISNYLNWYQQTPGKAPKLLVYATSGLQSGVPSRFTGSGSGTDFTLTISSLQPGDFAIYYCQQTYSAPWTFGQGTKVEIKRTVAAPSVFIFPPSDEQLKSGTASVVCLLNNFYPREAKVQWKVDNALQSGNSQESVTEQDSKDSTYSLSSTLTLSKADYEKHKVYACEVTHQGLSSPVTKSFNRGEC

SEQ ID NO: 1268 - protein, 107 aa, Artificial Sequence
  Description of Artificial Sequence: Synthetic polypeptide
DIVMTQSPPSLSASVGDRVTITCRASQSISNYLNWYQQTPGKAPKLLVYATSGLQSGVPSRFTGSGSGTDFTLTISSLQPGDFAIYYCQQTYSAPWTFGQGTKVEIK

SEQ ID NO: 1269 - DNA, 1428 bp, Artificial Sequence
  Description of Artificial Sequence: Synthetic polynucleotide
atgggatggtcatgtatcatcctttttctagtagcaactgcaaccggtgtacattcccaggtgcagctgcaggagtcgggcccaggactagtgaagccttcacagaccctgtccctcacctgcactgtctctggtggctccatcagcagtgctacttactactggagctggattcggcagcccgccgggaagggactggagtggattgggcatatttataccagtgggaccaccaactacaacccctccctcaagagtcgggtcaccatatcagttgacacgtccaagagccagttctccctgaagctgaattctgtgaccgccgcagacacggccgtgtattactgtgcgagaggtctacgattttgtagtgacaccaggtgctacccgtactttgactactggggccagggaaccctggtcaccgtctcctcagcgtcgaccaagggcccatcggtcttccccctggcaccctcctccaagagcacctctgggggcacagcggccctgggctgcctggtcaaggactacttccccgaaccagtgacggtgtcgtggaactcaggcgccctgaccagcggcgtgcacaccttcccggctgtcctacagtcctcaggactctactccctcagcagcgtggtgaccgtgccctccagcagcttgggcacccagacctacatctgcaacgtgaatcacaagcccagcaacaccaaggtggacaagaaagttgagcccaaatcttgtgacaaaactcacacatgcccaccgtgcccagcacctgaactcctggggggaccgtcagtcttcctcttccccccaaaacccaaggacaccctcatgatctcccggacccctgaggtcacatgcgtggtggtggacgtgagccacgaagaccctgaggtcaagttcaactggtacgtggacggcgtggaggtgcataatgccaagacaaagccgcgggaggagcagtacaacagcacgtaccgtgtggtcagcgtcctcaccgtcctgcaccaggactggctgaatggcaaggagtacaagtgcaaggtctccaacaaagccctcccagcccccatcgagaaaaccatctccaaagccaaagggcagccccgagaaccacaggtgtacaccctgcccccatcccgggatgagctgaccaagaaccaggtcagcctgacctgcctggtcaaaggcttctatcccagcgacatcgccgtggagtgggagagcaatgggcagccggagaacaactacaagaccacgcctcccgtgctggactccgacggctccttcttcctctacagcaagctcaccgtggacaagagcaggtggcagcaggggaacgtcttctcatgctccgtgctgcatgaggctctgcacagccactacacgcagaagagcctctccctgtctccgggtaaatga

SEQ ID NO: 1270 - DNA, 704 bp, Artificial Sequence
  Description of Artificial Sequence: Synthetic polynucleotide
atgggatggtcatgtatcatcctttttctagtagcaactgcaaccggtgtacattcagatattgtgatgacccagtctccaccctccctgtctgcatctgtgggagacagagtcaccatcacttgtcgggcaagtcagagcattagcaactatttaaattggtatcagcagacaccagggaaagcccctaagctcctggtctatgctacatccggtttgcaaagtggagtcccatcaaggttcactggcagtggatctgggacagatttcactctcaccatcagtagtctgcaacctggagactttgcaatttactactgtcaacagacttacagtgccccctggacgttcggccaggggaccaaggtggagatcaaacgtacggtggctgcaccatctgtcttcatcttcccgccatctgatgagcagttgaaatctggaactgcctctgttgtgtgcctgctgaataacttctaccccagagaagccaaagtgcagtggaaggtggacaacgccctgcagagcggaaacagccaggaaagcgtgacagagcaggattccaaggattccacatacagcctgagcagcacactgacactgtccaaggccgactacgagaagcacaaggtgtacgcctgcgaagtgacacaccagggactgtcctcccctgtgacaaagagcttcaacagaggagaatgctgata

SEQ ID NO: 1271 - DNA, 327 bp, Artificial Sequence
  Description of Artificial Sequence: Synthetic polynucleotide
gaaattgtgttgacacagtctccagacaccctgtctttgtctccaggggaaagagccaccctctcctgcagggccagtcagagtgtgggcacctacttagcctggttccaacagaaacctggccagcctcccaggctcctcatctatgatgcatccaacagggccactggcatcccagccaggttcggtggcagtgggtctgggacagacttcactctcaccatcagcagcctagagcctgaagattttgcagtttattactgtcagcagcgtagcaactggcctcggacgtggacgttcggccaagggaccaaggtggaaatcaaa

SEQ ID NO: 1272 - DNA, 384 bp, Artificial Sequence
  Description of Artificial Sequence: Synthetic polynucleotide
gaggtgcagctggtggagtctgggggaggcttggtacagcctggagggtccctgagactctcctgtgcagcctctggattcaccttcagtagttatgaaatgaactgggtccgccaggctccagggaaggggctggagtgggtttcaaagattaggagtagtggtagtaccatatactacgcagactctgtgaagggccgattcaccatctccagagacaacgccaagaactcactgtatctgcaaatgaacagcctgagagccgacgacacggctgtttattactgtgcgagagatgcgcgggggtactatgataggagtggttattactgggttccggagctcgactactggggccagggaaccctggtcaccgtctcctca

SEQ ID NO: 1273 - DNA, 333 bp, Artificial Sequence
  Description of Artificial Sequence: Synthetic polynucleotide
cagcctgtgctgactcaatcatcctctgcctctgcttccctgggctcctcggtcaagctcacctgcactctgagcagtgggcacagaagatacatcatcgcatggcatcagcagcagccagggaaggcccctcggtacttgatgaatcttgaaggtagtggaagctacaacaaggggagcggagttcctgatcgcttctcaggctccagctctggggctgactgctacctcaccatctccaacctccagtctgaggatgaggctgattattactgtgagacctgggacagtaacactcgtgtattcggcggagggaccaagctgaccgtccta

SEQ ID NO: 1274 - protein, 122 aa, Artificial Sequence
  Description of Artificial Sequence: Synthetic polypeptide
QVQLVQSGAEVRKPGASVKVSCKASGYTFTDYYIHWVRQAPGQGLEWMGIINPEAGSTTSAQRFQGRLIMTTDTSASTVYMELNSLTSADTAVYYCARDYFLIPAANTMEVWGQGTTVTVSS

SEQ ID NO: 1275 - protein, 109 aa, Artificial Sequence
  Description of Artificial Sequence: Synthetic polypeptide
EIVLTQSPDTLSLSPGERATLSCRASQSVGTYLAWFQQKPGQPPRLLIYDASNRATGIPARFGGSGSGTDFTLTISSLEPEDFAVYYCQQRSNWPRTWTFGQGTKVEIK

SEQ ID NO: 1276 - protein, 128 aa, Artificial Sequence
  Description of Artificial Sequence: Synthetic polypeptide
EVQLVESGGGLVQPGGSLRLSCAASGFTFSSYEMNWVRQAPGKGLEWVSKIRSSGSTIYYADSVKGRFTISRDNAKNSLYLQMNSLRADDTAVYYCARDARGYYDRSGYYWVPELDYWGQGTLVTVSS

SEQ ID NO: 1277 - protein, 111 aa, Artificial Sequence
  Description of Artificial Sequence: Synthetic polypeptide
QPVLTQSSSASASLGSSVKLTCTLSSGHRRYIIAWHQQQPGKAPRYLMNLEGSGSYNKGSGVPDRFSGSSSGADCYLTISNLQSEDEADYYCETWDSNTRVFGGGTKLTVL

SEQ ID NO: 1278 - protein, 4 aa, Unknown
  Description of Unknown: S1/S2 furin cleavage site sequence
RRAR

SEQ ID NO: 1279 - protein, 4 aa, Artificial Sequence
  Description of Artificial Sequence: Synthetic peptide
GSAS

SEQ ID NO: 1280 - protein, 5 aa, Artificial Sequence
  Description of Artificial Sequence: Synthetic peptide
LEWIG

SEQ ID NO: 1281 - protein, 236 aa, Artificial Sequence; identical to SEQ ID NO: 1261
  Description of Artificial Sequence: Synthetic polypeptide

SEQ ID NO: 1282 - protein, 472 aa, Artificial Sequence; identical to SEQ ID NO: 1252
  Description of Artificial Sequence: Synthetic polypeptide

SEQ ID NO: 1283 - protein, 233 aa, Artificial Sequence; identical to SEQ ID NO: 1255
  Description of Artificial Sequence: Synthetic polypeptide

SEQ ID NO: 1284 - protein, 8 aa, Artificial Sequence
  Description of Artificial Sequence: Synthetic 8xHis tag
HHHHHHHH

SEQ ID NO: 1285 - DNA, 22 bp, Artificial Sequence
  Description of Artificial Sequence: Synthetic primer
atattgcagcagtacgcacaca

SEQ ID NO: 1286 - DNA, 26 bp, Artificial Sequence
  Description of Artificial Sequence: Synthetic primer
acaggtacgttaatagttaatagcgt

SEQ ID NO: 1287 - DNA, 17 bp, Artificial Sequence
  Description of Artificial Sequence: Synthetic probe
atccttactgcgcttcg

SEQ ID NO: 1288 - DNA, 23 bp, Artificial Sequence
  Description of Artificial Sequence: Synthetic primer
cgatctcttgtagatctgttctc

SEQ ID NO: 1289 - DNA, 22 bp, Artificial Sequence
  Description of Artificial Sequence: Synthetic primer
atattgcagcagtacgcacaca

SEQ ID NO: 1290 - DNA, 26 bp, Artificial Sequence
  Description of Artificial Sequence: Synthetic probe
acactagccatccttactgcgcttcg

SEQ ID NO: 1291 - DNA, 23 bp, Artificial Sequence
  Description of Artificial Sequence: Synthetic primer
cgatctcttgtagatctgttctc

SEQ ID NO: 1292 - DNA, 20 bp, Artificial Sequence
  Description of Artificial Sequence: Synthetic primer
ggtgaaccaagacgcagtat

SEQ ID NO: 1293 - DNA, 25 bp, Artificial Sequence
  Description of Artificial Sequence: Synthetic probe
taaccagaatggagaacgcagtggg

SEQ ID NO: 1294 - DNA, 1419 bp, Artificial Sequence
  Description of Artificial Sequence: Synthetic polynucleotide
atgcgcatgcagctgctgctgctgatcgccctgtccctggccctggtgaccaactcccaggtccagctggtgcagtctggggctgaggtgaagaagcctgggtcctcggtgaaggtctcctgcaaggcttctggaggcaccttcagcagctatgctatcagctgggtgcgacaggcccctggacaagggcttgagtggatgggaaggatcatccctatgtttggtatagcaaattacgcacagaagttccagggcagagtcacgattaccgcggacaaatccacgagcacagcctacttggagctgagcagcctgagatctgaggacacggccgtgtactactgtgcgagatatatggtgacacgggaccagtactactacgatatggacgtctggggccaagggaccacggtcaccgtctcgtcagcttccaccaagggcccctccgtgttccccctggccccctcctccaagtccacctccggcggcaccgccgccctgggctgcctggtgaaggactacttccccgagcccgtgaccgtgtcctggaactccggcgccctgacctccggcgtgcacaccttccccgccgtgctgcagtcctccggcctgtactccctgtcctccgtggtgaccgtgccctcctcctccctgggcacccagacctacatctgcaacgtgaaccacaagccctccaacaccaaggtggacaagaaggtggagcccaagtcctgcgacaagacccacacctgccccccctgccccgcccccgagctgctgggcggcccctccgtgttcctgttcccccccaagcccaaggacaccctgatgatctcccgcacccccgaggtgacctgcgtggtggtggacgtgtcccacgaggaccccgaggtgaagttcaactggtacgtggacggcgtggaggtgcacaacgccaagaccaagccccgcgaggagcagtacaactccacctaccgcgtggtgtccgtgctgaccgtgctgcaccaggactggctgaacggcaaggagtacaagtgcaaggtgtccaacaaggccctgcccgcccccatcgagaagaccatctccaaggccaagggccagccccgcgagccccaggtgtacaccctgcccccctcccgcgacgagctgaccaagaaccaggtgtccctgacctgcctggtgaagggcttctacccctccgacatcgccgtggagtgggagtccaacggccagcccgagaacaactacaagaccaccccccccgtgctggactccgacggctccttcttcctgtactccaagctgaccgtggacaagtcccgctggcagcagggcaacgtgttctcctgctccgtgctgcacgaggccctgcactcccactacacccagaagtccctgtccctgtcccccggcaagtaa

SEQ ID NO: 1295 - RNA, 1416 nt, Artificial Sequence
  Description of Artificial Sequence: Synthetic polynucleotide
augcgcaugcagcugcugcugcugaucgcccugucccuggcccuggugaccaacucccagguccagcuggugcagucuggggcugaggugaagaagccuggguccucggugaaggucuccugcaaggcuucuggaggcaccuucagcagcuaugcuaucagcugggugcgacaggccccuggacaagggcuugaguggaugggaaggaucaucccuauguuugguauagcaaauuacgcacagaaguuccagggcagagucacgauuaccgcggacaaauccacgagcacagccuacuuggagcugagcagccugagaucugaggacacggccguguacuacugugcgagauauauggugacacgggaccaguacuacuacgauauggacgucuggggccaagggaccacggucaccgucucgucagcuuccaccaagggccccuccguguucccccuggcccccuccuccaaguccaccuccggcggcaccgccgcccugggcugccuggugaaggacuacuuccccgagcccgugaccguguccuggaacuccggcgcccugaccuccggcgugcacaccuuccccgccgugcugcaguccuccggccuguacucccuguccuccguggugaccgugcccuccuccucccugggcacccagaccuacaucugcaacgugaaccacaagcccuccaacaccaagguggacaagaagguggagcccaaguccugcgacaagacccacaccugcccccccugccccgcccccgagcugcugggcggccccuccguguuccuguucccccccaagcccaaggacacccugaugaucucccgcacccccgaggugaccugcguggugguggacgugucccacgaggaccccgaggugaaguucaacugguacguggacggcguggaggugcacaacgccaagaccaagccccgcgaggagcaguacaacuccaccuaccgcgugguguccgugcugaccgugcugcaccaggacuggcugaacggcaaggaguacaagugcaagguguccaacaaggcccugcccgcccccaucgagaagaccaucuccaaggccaagggccagccccgcgagccccagguguacacccugccccccucccgcgacgagcugaccaagaaccaggugucccugaccugccuggugaagggcuucuaccccuccgacaucgccguggagugggaguccaacggccagcccgagaacaacuacaagaccaccccccccgugcuggacuccgacggcuccuucuuccuguacuccaagcugaccguggacaagucccgcuggcagcagggcaacguguucuccugcuccgugcugcacgaggcccugcacucccacuacacccagaagucccugucccugucccccggcaag

SEQ ID NO: 1296 - protein, 472 aa, Artificial Sequence
  Description of Artificial Sequence: Synthetic polypeptide
MRMQLLLLIALSLALVTNSQVQLVQSGAEVKKPGSSVKVSCKASGGTFSSYAISWVRQAPGQGLEWMGRIIPMFGIANYAQKFQGRVTITADKSTSTAYLELSSLRSEDTAVYYCARYMVTRDQYYYDMDVWGQGTTVTVSSASTKGPSVFPLAPSSKSTSGGTAALGCLVKDYFPEPVTVSWNSGALTSGVHTFPAVLQSSGLYSLSSVVTVPSSSLGTQTYICNVNHKPSNTKVDKKVEPKSCDKTHTCPPCPAPELLGGPSVFLFPPKPKDTLMISRTPEVTCVVVDVSHEDPEVKFNWYVDGVEVHNAKTKPREEQYNSTYRVVSVLTVLHQDWLNGKEYKCKVSNKALPAPIEKTISKAKGQPREPQVYTLPPSRDELTKNQVSLTCLVKGFYPSDIAVEWESNGQPENNYKTTPPVLDSDGSFFLYSKLTVDKSRWQQGNVFSCSVLHEALHSHYTQKSLSLSPGK

SEQ ID NO: 1297 - DNA, 702 bp, Artificial Sequence
  Description of Artificial Sequence: Synthetic polynucleotide
atgcgcatgcagctgctgctgctgatcgccctgtccctggccctggtgaccaactccgacatccagatgacccagtctccatcctccctgtctgcatctgtaggagacagagtcaccatcacttgccgggcaagtcagagcattagcaactatttaaattggtatcagcagaaaccagggaaagcccctaagctcctgatctatgctgcatccagtttgcaaagtggggtcccatcaaggttcagtggcagtggatctgggacagatttcactctcaccatcagcagtctgcaacctgaagattttgcaacttactactgtcaacagagttacagtccccctcccacttttggccaggggaccaagctggagatcaaacgaaccgtggccgccccctccgtgttcatcttccccccctccgacgagcagctgaagtccggcaccgcctccgtggtgtgcctgctgaacaacttctacccccgcgaggccaaggtgcagtggaaggtggacaacgccctgcagtccggcaactcccaggagtccgtgaccgagcaggactccaaggactccacctactccctgtcctccaccctgaccctgtccaaggccgactacgagaagcacaaggtgtacgcctgcgaggtgacccaccagggcctgtcctcccccgtgaccaagtccttcaaccgcggcgagtgctaa

SEQ ID NO: 1298 - RNA, 699 nt, Artificial Sequence
  Description of Artificial Sequence: Synthetic polynucleotide
augcgcaugcagcugcugcugcugaucgcccugucccuggcccuggugaccaacuccgacauccagaugacccagucuccauccucccugucugcaucuguaggagacagagucaccaucacuugccgggcaagucagagcauuagcaacuauuuaaauugguaucagcagaaaccagggaaagccccuaagcuccugaucuaugcugcauccaguuugcaaaguggggucccaucaagguucaguggcaguggaucugggacagauuucacucucaccaucagcagucugcaaccugaagauuuugcaacuuacuacugucaacagaguuacagucccccucccacuuuuggccaggggaccaagcuggagaucaaacgaaccguggccgcccccuccguguucaucuucccccccuccgacgagcagcugaaguccggcaccgccuccguggugugccugcugaacaacuucuacccccgcgaggccaaggugcaguggaagguggacaacgcccugcaguccggcaacucccaggaguccgugaccgagcaggacuccaaggacuccaccuacucccuguccuccacccugacccuguccaaggccgacuacgagaagcacaagguguacgccugcgaggugacccaccagggccuguccucccccgugaccaaguccuucaaccgcggcgagugc

SEQ ID NO: 1299 - protein, 233 aa, Artificial Sequence
  Description of Artificial Sequence: Synthetic polypeptide
MRMQLLLLIALSLALVTNSDIQMTQSPSSLSASVGDRVTITCRASQSISNYLNWYQQKPGKAPKLLIYAASSLQSGVPSRFSGSGSGTDFTLTISSLQPEDFATYYCQQSYSPPPTFGQGTKLEIKRTVAAPSVFIFPPSDEQLKSGTASVVCLLNNFYPREAKVQWKVDNALQSGNSQESVTEQDSKDSTYSLSSTLTLSKADYEKHKVYACEVTHQGLSSPVTKSFNRGEC
